(19) United States
(12) Patent Application Publication
(10) Pub. No.: US 2024/0350665 A1
(43) Pub. Date: Oct. 24, 2024

(54) HEPATITIS B VIRUS (HBV) KNOCKOUTS

(71) Applicant: EmendoBio Inc., Wilmington, DE (US)

(72) Inventor: Rafi EMMANUEL, Ramla (IL)

(73) Assignee: EmendoBio Inc., Wilmington, DE (US)

(21) Appl. No.: 18/291,051

(22) PCT Filed: Jul. 21, 2022
(86) PCT No.: PCT/US22/73981

§ 371 Date: Jan. 22, 2024

Related U.S. Application Data
(60) Provisional application No. 63/224,581, filed on Jul. 22, 2021.

(51) Int. Cl. A61K 48/00; C12N 7/00; C12N 9/22; C12N 15/11

(52) U.S. Cl. CPC A61K 48/005; C12N 7/00; C12N 9/22; C12N 15/111; C12N 2310/20; C12N 2730/10121; C12N 2730/10162

(57) ABSTRACT

RNA molecules comprising a guide sequence portion having 17-50 contiguous nucleotides containing nucleotides in the sequence set forth in any one of SEQ ID NOs: 1-18936 and compositions, methods, and uses thereof.

[0001] This application claims the benefit of U.S. Provisional Application 63/224,581, filed Jul. 22, 2021, the content of which is hereby incorporated by reference.

[0002] Throughout this application, various publications are referenced, including referenced in parenthesis. The disclosures of all publications mentioned in this application in their entireties are hereby incorporated by reference into this application in order to provide additional description of the art to which this invention pertains and of the features in the art which can be employed with this invention.

### REFERENCE TO SEQUENCE LISTING

[0003] This application incorporates-by-reference nucleotide sequences which are present in the file named “220721_91770-A-PCT_Sequence_Listing_AWG.xml”, which is 23,850 kilobytes in size, and which was created on Jul. 19, 2022 in the IBM-PC machine format, having an operating system compatibility with MS-Windows, which is contained in the XML file filed Jul. 21, 2022 as part of this application.

### BACKGROUND OF INVENTION

### Hepatitis B Virus and Liver Infection

[0004] Hepatitis B virus (HBV) is the causative agent of hepatitis B liver infection (which is also referred to as “hepatitis B”). According to the CDC, while hepatitis B is a short-term illness for many, it can become a long-term, chronic infection that can lead to serious health issues like cirrhosis or liver cancer. Risk for chronic infection is related to age at infection: about 90% of infants with hepatitis B go on to develop chronic infection, whereas only 2%-6% of people who get hepatitis B as adults become chronically infected. An efficient cure of chronic HBV infection will require elimination of the HBV covalently closed circular DNA (cccDNA), which is the long-lived viral genomic intermediate that is the template for HBV replication and persistence.

### SUMMARY OF THE INVENTION

[0005] Disclosed is an approach for disrupting a HBV genomic DNA molecule in a cell. According to some aspects of the invention, the approach results in knocking out the expression of an HBV gene. In some embodiments, the present disclosure provides a method for disrupting a conserved region of an HBV sequence or a portion thereof. In some embodiments, the present disclosure provides a method for disrupting a regulatory element of an HBV sequence or a portion thereof. In some embodiments, the present disclosure provides a method for disrupting a coding sequence of an HBV sequence or a portion thereof. In some embodiments, an HBV sequence is targeted and modified within an HBV covalently closed circular DNA (cccDNA) molecule and/or within a mammalian host genomic DNA molecule. According to some aspects, the present disclosure provides a method for targeting and modifying a sequence of an HBV covalently closed circular DNA (cccDNA) molecule.

[0006] The present disclosure also provides a method for modifying a hepatitis B virus (HBV) gene in a cell containing HBV, the method comprising
[0007] introducing to the cell a composition comprising:
   [0008] at least one CRISPR nuclease or a nucleotide sequence encoding a CRISPR nuclease; and
   [0009] a first RNA molecule comprising a guide sequence portion having 17-50 nucleotides or a nucleotide sequence encoding the same,
[0010] wherein a complex of the CRISPR nuclease and the first RNA molecule affects a double strand break in the HBV gene.

[0011] According to embodiments of the present invention, there is provided a first RNA molecule comprising a guide sequence portion having 17-50 contiguous nucleotides containing nucleotides in the sequence set forth in any one of SEQ ID Nos: 1-18936.

[0012] According to some embodiments of the present invention, there is provided a composition comprising an RNA molecule comprising a guide sequence portion having 17-50 contiguous nucleotides containing nucleotides in the sequence set forth in any one of SEQ ID NOs: 1-18936 and a CRISPR nuclease.

[0013] According to some embodiments of the present invention, there is provided a method for treating hepatitis B, the method comprising delivering to a cell of a subject having hepatitis B a composition comprising an RNA molecule comprising a guide sequence portion having 17-50 contiguous nucleotides containing nucleotides in the sequence set forth in any one of SEQ ID NOs: 1-18936 and a CRISPR nuclease.

[0014] According to some embodiments of the present invention, there is provided a method for inactivating a hepatitis B virus in a cell, the method comprising delivering to a cell containing hepatitis B virus a composition comprising an RNA molecule comprising a guide sequence portion having 17-50 contiguous nucleotides containing nucleotides in the sequence set forth in any one of SEQ ID NOs: 1-18936 and a CRISPR nuclease.

### BRIEF DESCRIPTION OF THE DRAWINGS

[0015] FIG. 1A shows a schematic representation of HBV cccDNA (linearized) molecule, and FIG. 1B shows how HBV segments were cloned into a lentiviral vector for use in subsequent infection of HeLa cells.

[0016] FIG. 2 shows activity of guide molecules targeting HBV in HeLa cells. Specific guide molecules were-co-transfected with wild-type OMNI-79 (WT) nuclease or the OMNI-79 V5570 variant nuclease to determine the on-target activity of the guide molecules. Cells were harvested 72 hours post DNA transfection, genomic was DNA extracted, the region containing the nuclease cut-site was amplified, and then analyzed by next-generation sequencing (NGS). The graph represents the % of editing±STDV of three independent transfections in cells transfected with lentivirus at a multiplicity of infection (MOI) of 2.

### DETAILED DESCRIPTION

[0017] Unless otherwise defined, all technical and/or scientific terms used herein have the same meaning as commonly understood by one of ordinary skill in the art to which the invention pertains. Although methods and materials similar or equivalent to those described herein can be used in the practice or testing of embodiments of the invention, exemplary methods and/or materials are described below. In case of conflict, the patent specification, including definitions, will control. In addition, the materials, methods, and examples are illustrative only and are not intended to be necessarily limiting.

[0018] It should be understood that the terms “a” and “an” as used above and elsewhere herein refer to “one or more” of the enumerated components. It will be clear to one of ordinary skill in the art that the use of the singular includes the plural unless specifically stated otherwise. Therefore, the terms “a,” “an” and “at least one” are used interchangeably in this application.

[0019] For purposes of better understanding the present teachings and in no way limiting the scope of the teachings, unless otherwise indicated, all numbers expressing quantities, percentages or proportions, and other numerical values used in the specification and claims, are to be understood as being modified in all instances by the term “about.” Accordingly, unless indicated to the contrary, the numerical parameters set forth in the following specification and attached claims are approximations that may vary depending upon the desired properties sought to be obtained. At the very least, each numerical parameter should at least be construed in light of the number of reported significant digits and by applying ordinary rounding techniques.

[0020] Unless otherwise stated, adjectives such as “substantially” and “about” modifying a condition or relationship characteristic of a feature or features of an embodiment of the invention, are understood to mean that the condition or characteristic is defined to within tolerances that are acceptable for operation of the embodiment for an application for which it is intended. Unless otherwise indicated, the word “or” in the specification and claims is considered to be the inclusive “or” rather than the exclusive or, and indicates at least one of, or any combination of items it conjoins.

[0021] In the description and claims of the present application, each of the verbs, “comprise,” “include” and “have” and conjugates thereof, are used to indicate that the object or objects of the verb are not necessarily a complete listing of components, elements or parts of the subject or subjects of the verb. Other terms as used herein are meant to be defined by their well-known meanings in the art.

[0022] In some embodiments of the present invention, a DNA nuclease is utilized to affect a DNA break at a target site to induce cellular repair mechanisms, for example, but not limited to, non-homologous end-joining (NHEJ). During classical NHEJ, two ends of a double-strand break (DSB) site are ligated together in a fast but also inaccurate manner (i.e. frequently resulting in mutation of the DNA at the cleavage site in the form of small insertion or deletions) whereas during HDR, an intact homologous DNA donor is used to replace the DNA surrounding the cleavage site in an accurate manner. HDR can also mediate the precise insertion of exogenous DNA at the break site. Accordingly, the term “homology-directed repair” or “HDR” refers to a mechanism for repairing DNA damage in cells, for example, during repair of double-stranded and single-stranded breaks in DNA. HDR requires nucleotide sequence homology and uses a “nucleic acid template” (nucleic acid template or donor template used interchangeably herein) to repair the sequence where the double-stranded or single break occurred (e.g., DNA target sequence). This results in the transfer of genetic information from, for example, the nucleic acid template to the DNA target sequence. HDR may result in alteration of the DNA target sequence (e.g., insertion, deletion, mutation) if the nucleic acid template sequence differs from the DNA target sequence and part or all of the nucleic acid template polynucleotide or oligonucleotide is incorporated into the DNA target sequence. In some embodiments, an entire nucleic acid template polynucleotide, a portion of the nucleic acid template polynucleotide, or a copy of the nucleic acid template is integrated at the site of the DNA target sequence.

[0023] As used herein, the term “targeting sequence” or “targeting molecule” refers a nucleotide sequence or molecule comprising a nucleotide sequence that is capable of hybridizing to a specific target sequence, e.g., the targeting sequence has a nucleotide sequence which is at least partially complementary to the sequence being targeted along the length of the targeting sequence. The targeting sequence or targeting molecule may be part of an RNA molecule that can form a complex with a CRISPR nuclease, either alone or in combination with other RNA molecules, with the targeting sequence serving as the targeting portion of the CRISPR complex. When the molecule having the targeting sequence is present contemporaneously with the CRISPR molecule, the RNA molecule, alone or in combination with an additional one or more RNA molecules (e.g. a tracrRNA molecule), is capable of targeting the CRISPR nuclease to the specific target sequence. As non-limiting example, a guide sequence portion of a CRISPR RNA molecule or single-guide RNA molecule may serve as a targeting molecule. Each possibility represents a separate embodiment. A targeting sequence can be custom designed to target any desired sequence.

[0024] The term “targets” as used herein, refers to preferentially hybridizing a targeting sequence of a targeting molecule to a nucleic acid having a targeted nucleotide sequence. It is understood that the term “targets” encompasses variable hybridization efficiencies, such that there is preferential targeting of the nucleic acid having the targeted nucleotide sequence, but unintentional off-target hybridization in addition to on-target hybridization might also occur. It is understood that where an RNA molecule targets a sequence, a complex of the RNA molecule and a CRISPR nuclease molecule targets the sequence for nuclease activity.

[0025] The “guide sequence portion” of an RNA molecule refers to a nucleotide sequence that is capable of hybridizing to a specific target DNA sequence, e.g., the guide sequence portion has a nucleotide sequence which is partially or fully complementary to the DNA sequence being targeted along the length of the guide sequence portion. In some embodiments, the guide sequence portion is 17, 18, 19, 20, 21, 22, 23, 24, 25, 26, 27, 28, 29, 30, 31, 32, 33, 34, 35, 36, 37, 38, 39, 40, 41, 42, 43, 44, 45, 46, 47, 48, 49 or 50 nucleotides in length, or approximately 17-50, 17-49, 17-48, 17-47, 17-46, 17-45, 17-44, 17-43, 17-42, 17-41, 17-40, 17-39, 17-38, 17-37, 17-36, 17-35, 17-34, 17-33, 17-31, 17-30, 17-29, 17-28, 17-27, 17-26, 17-25, 17-24, 17-22, 17-21, 18-25, 18-24, 18-23, 18-22, 18-21, 19-25, 19-24, 19-23, 19-22, 19-21, 19-20, 20-22, 18-20, 20-21, 21-22, or 17-20 nucleotides in length. Preferably, the entire length of the guide sequence portion is fully complementary to the DNA sequence being targeted along the length of the guide sequence portion. The guide sequence portion may be part of an RNA molecule that can form a complex with a CRISPR nuclease with the guide sequence portion serving as the DNA targeting portion of the CRISPR complex. When the DNA molecule having the guide sequence portion is present contemporaneously with the CRISPR molecule, the RNA molecule is capable of targeting the CRISPR nuclease to the specific target DNA sequence. Each possibility represents a separate embodiment. An RNA molecule can be custom designed to target any desired sequence. Accordingly, a molecule comprising a “guide sequence portion” is a type of targeting molecule. In some embodiments, the guide sequence portion comprises a sequence that is the same as, or differs by no more than 1, 2, 3, 4, or 5 nucleotides from, a guide sequence portion described herein, e.g., a guide sequence set forth in any of SEQ ID NOs:1-18936. Each possibility represents a separate embodiment. In some of these embodiments, the guide sequence portion is fully complementary to the target sequence and comprises a sequence that is the same as a sequence set forth in any of SEQ ID NOs:1-18936. Throughout this application, the terms “guide molecule,” “RNA guide molecule,” “guide RNA molecule,” and “gRNA molecule” are synonymous with a molecule comprising a guide sequence portion, and the term “spacer” is synonymous with a “guide sequence portion.”

[0026] In embodiments of the present invention, an RNA molecule comprises a guide sequence portion having 17-50 contiguous nucleotides containing nucleotides in the sequence set forth in any one of SEQ ID NOs: 1-18936.

[0027] The RNA molecule and or the guide sequence portion of the RNA molecule may contain modified nucleotides. Exemplary modifications to nucleotides/polynucleotides may be synthetic and encompass polynucleotides which contain nucleotides comprising bases other than the naturally occurring adenine, cytosine, thymine, uracil, or guanine bases. Modifications to polynucleotides include polynucleotides which contain synthetic, non-naturally occurring nucleosides e.g., locked nucleic acids. Modifications to polynucleotides may be utilized to increase or decrease stability of an RNA. An example of a modified polynucleotide is an mRNA containing 1-methyl pseudo-uridine. For examples of modified polynucleotides and their uses, see U.S. Pat. No. 8,278,036, PCT International Publication No. WO/2015/006747, and Weissman and Kariko (2015), hereby incorporated by reference.

[0028] As used herein, “contiguous nucleotides” set forth in a SEQ ID NO refers to nucleotides in a sequence of nucleotides in the order set forth in the SEQ ID NO without any intervening nucleotides.

[0029] In embodiments of the present invention, the guide sequence portion may be 25 nucleotides in length and contain 20-22 contiguous nucleotides in the sequence set forth in any one of SEQ ID NOs: 1-18936. In embodiments of the present invention, the guide sequence portion may be less than 22 nucleotides in length. For example, in embodiments of the present invention the guide sequence portion may be 17, 18, 19, 20, or 21 nucleotides in length. In such embodiments the guide sequence portion may consist of 17, 18, 19, 20, or 21 nucleotides, respectively, in the sequence of 17-22 contiguous nucleotides set forth in any one of SEQ ID NOs: 1-18936. For example, a guide sequence portion having 17 nucleotides in the sequence of 17 contiguous nucleotides set forth in SEQ ID NO: 18937 may consist of any one of the following nucleotide sequences (nucleotides excluded from the contiguous sequence are marked in strike-through):

(SEQ ID NO: 18937)
AAAAAAAUGUACUUGGUUCC
17 nucleotide guide sequence 1:
(SEQ ID NO: 18938) [symbol]
AAAAUGUACUUGGUUCC
17 nucleotide guide sequence 2:
(SEQ ID NO: 18939) [symbol]
AAAAAUGUACUUGGUUC [symbol]
17 nucleotide guide sequence 3:
(SEQ ID NO: 18940) [symbol]
AAAAAAUGUACUUGGUU [symbol]
17 nucleotide guide sequence 4:
(SEQ ID NO: 18941)
AAAAAAAUGUACUUGGU

[symbol]

[0030] In embodiments of the present invention, the guide sequence portion may be greater than 20 nucleotides in length. For example, in embodiments of the present invention the guide sequence portion may be 21, 22, 23, 24 or 25 nucleotides in length. In such embodiments the guide sequence portion comprises 17-50 nucleotides containing the sequence of 20, 21 or 22 contiguous nucleotides set forth in any one of SEQ ID NOs: 1-18936 and additional nucleotides fully complimentary to a nucleotide or sequence of nucleotides adjacent to the 3′ end of the target sequence, 5′ end of the target sequence, or both.

[0031] In embodiments of the present invention a CRISPR nuclease and an RNA molecule comprising a guide sequence portion form a CRISPR complex that binds to a target DNA sequence to effect cleavage of the target DNA sequence. CRISPR nucleases, e.g. Cpf1, may form a CRISPR complex comprising a CRISPR nuclease and RNA molecule without a further tracrRNA molecule. Alternatively, CRISPR nucleases, e.g. Cas9, may form a CRISPR complex between the CRISPR nuclease, an RNA molecule, and a tracrRNA molecule. A guide sequence portion, which comprises a nucleotide sequence that is capable of hybridizing to a specific target DNA sequence, and a sequence portion that participates in CRIPSR nuclease binding, e.g. a tracrRNA sequence portion, can be located on the same RNA molecule. Alternatively, a guide sequence portion may be located on one RNA molecule and a sequence portion that participates in CRIPSR nuclease binding, e.g. a tracrRNA portion, may located on a separate RNA molecule. A single RNA molecule comprising a guide sequence portion (e.g. a DNA-targeting RNA sequence) and at least one CRISPR protein-binding RNA sequence portion (e.g. a tracrRNA sequence portion), can form a complex with a CRISPR nuclease and serve as the DNA-targeting molecule. In some embodiments, a first RNA molecule comprising a DNA-targeting RNA portion, which includes a guide sequence portion, and a second RNA molecule comprising a CRISPR protein-binding RNA sequence interact by base pairing to form an RNA complex that targets the CRISPR nuclease to a DNA target site or, alternatively, are fused together to form an RNA molecule that complexes with the CRISPR nuclease and targets the CRISPR nuclease to a DNA target site.

[0032] In embodiments of the present invention, a RNA molecule comprising a guide sequence portion may further comprise the sequence of a tracrRNA molecule. Such embodiments may be designed as a synthetic fusion of the guide portion of the RNA molecule and the trans-activating crRNA (tracrRNA). (See Jinek et al., 2012). In such an embodiment, the RNA molecule is a single guide RNA (sgRNA) molecule. Embodiments of the present invention may also form CRISPR complexes utilizing a separate tracrRNA molecule and a separate RNA molecule comprising a guide sequence portion. In such embodiments the tracrRNA molecule may hybridize with the RNA molecule via basepairing and may be advantageous in certain applications of the invention described herein.

[0033] The term “tracr mate sequence” refers to a sequence sufficiently complementary to a tracrRNA molecule so as to hybridize to the tracrRNA via basepairing and promote the formation of a CRISPR complex. (See U.S. Pat. No. 8,906,616). In embodiments of the present invention, the RNA molecule may further comprise a portion having a tracr mate sequence.

[0034] A “gene,” for the purposes of the present disclosure, includes a DNA region encoding a gene product, as well as all DNA regions which regulate the production of the gene product, whether or not such regulatory sequences are adjacent to coding and/or transcribed sequences. Accordingly, a gene includes, but is not necessarily limited to, promoter sequences, terminators, translational regulatory sequences such as ribosome binding sites and internal ribosome entry sites, enhancers, silencers, insulators, boundary elements, replication origins, matrix attachment sites and locus control regions.

[0035] “Eukaryotic” cells include, but are not limited to, fungal cells (such as yeast), plant cells, animal cells, mammalian cells and human cells.

[0036] The term “nuclease” as used herein refers to an enzyme capable of cleaving the phosphodiester bonds between the nucleotide subunits of nucleic acid. A nuclease may be isolated or derived from a natural source. The natural source may be any living organism. Alternatively, a nuclease may be a modified or a synthetic protein which retains the phosphodiester bond cleaving activity. Gene modification can be achieved using a nuclease, for example a CRISPR nuclease.

[0037] The term “conserved region” as used herein refers to a region of a nucleotide molecule or of an amino acid molecule having sequence identity across several different species or strains. Similarly, the term “conserved sequence” as used here refers to a sequence having sequence identity across several different species or strains. For example, a conserved sequence of HBV DNA is an HBV DNA sequence that has sequence identity across several different strains, variants, or serotypes of HBV. The sequence identity may be, for example: at least 70% sequence identity, 80% sequence identity, 81% sequence identity, 82% sequence identity, 83% sequence identity, 84% sequence identity, 85% sequence identity, 86% sequence identity, 87% sequence identity, 88% sequence identity, 89% sequence identity, or 90% sequence identity across several HBV strains, variants, or serotypes.

[0038] According to embodiments of the present invention, there is provided a method for modifying a hepatitis B virus (HBV) sequence in a cell, the method comprising
[0039] introducing to the cell a composition comprising:
   [0040] at least one CRISPR nuclease or a nucleotide sequence encoding a CRISPR nuclease; and
   [0041] a first RNA molecule comprising a guide sequence portion having 17-50 nucleotides or a nucleotide sequence encoding the same,
[0042] wherein a complex of the CRISPR nuclease and the first RNA molecule affects a double strand break in the HBV sequence.

[0043] In some embodiments, the guide sequence portion of the first RNA molecule comprises 17-50 contiguous nucleotides containing nucleotides in the sequence set forth in any one of SEQ ID NOs: 1-18936.

[0044] In some embodiments, a double-strand break is affected in a hepatitis B virus DNA sequence. In some embodiments, a double-strand break is affected in an HBV gene or portion thereof, an HBV coding sequence or portion thereof, an HBV regulatory sequence or portion thereof, and/or a conserved HBV sequence.

[0045] In some embodiments, a double-strand break is affected up to 500 nucleotides upstream or downstream to an HBV coding sequence, an HBV regulatory sequence, and/or a conserved HBV sequence. Each possibility represents a separate embodiment. In some embodiments, an HBV conserved region is targeted.

[0046] In some embodiments, the method further comprises introducing to the cell a second RNA molecule comprising a guide sequence portion having 17-50 nucleotides or a nucleotide sequence encoding the same, wherein a complex of the second RNA molecule and a CRISPR nuclease affects a second double strand break in a hepatitis B virus sequence.

[0047] In some embodiments, the guide sequence portion of the second RNA molecule comprises 17-50 contiguous nucleotides containing nucleotides in the sequence set forth in any one of SEQ ID NOs: 1-18936 other than the sequence of the first RNA molecule.

[0048] In some embodiments, a sequence of nucleotides is excised from a molecule comprising the HBV sequence.

[0049] In some embodiments, the sequence of nucleotides excised from the HBV sequence comprises an HBV gene or portion thereof, an HBV coding sequence or portion thereof, an HBV regulatory sequence or portion thereof, and/or a conserved HBV sequence.

[0050] In some embodiments, an HBV gene or a portion thereof is excised. In some embodiments, an HBV regulatory sequence or a portion thereof is excised. In some embodiments, an HBV non-coding sequence or a portion thereof is excised.

[0051] In some embodiments, the first or second RNA molecule comprises a guide sequence portion that targets a sequence that is located up to 500 base pairs from an HBV gene, an HBV coding sequence, an HBV regulatory sequence, and/or a conserved HBV sequence that is to be excised by the first and second RNA molecules.

[0052] In some embodiments, the HBV sequence is excised from an HBV cccDNA molecule.

[0053] In some embodiments, the HBV sequence is excised from a genomic DNA molecule that an HBV sequence has integrated into.

[0054] In some embodiments, the cell is a liver cell or a hepatocyte.

[0055] In some embodiments, the cell is in a human subject.

[0056] In some embodiments, the human subject suffers from chronic or acute hepatitis B.

[0057] In some embodiments, the HBV sequence is located on an HBV covalently closed circular DNA (cccDNA) molecule.

[0058] In some embodiments, the HBV sequence is located on a genomic DNA molecule that an HBV sequence has integrated into.

[0059] According to embodiments of the present invention, there is provided a composition comprising a first RNA molecule, the first RNA molecule comprising a guide sequence portion having 17-50 contiguous nucleotides containing nucleotides in the sequence set forth in any one of SEQ ID NOs: 1-18936.

[0060] In some embodiments, the composition further comprises at least one CRISPR nuclease.

[0061] In some embodiments, the composition further comprises a second RNA molecule comprising a guide sequence portion having 17-50 contiguous nucleotides, wherein the second RNA molecule targets a HBV gene, and wherein the guide sequence portion of the second RNA molecule is a different sequence from the sequence of the guide sequence portion of the first RNA molecule.

[0062] In some embodiments, the guide sequence portion of the second RNA molecule comprises 17-50 contiguous nucleotides containing nucleotides in the sequence set forth in any one of SEQ ID NOs: 1-18936 other than the sequence of the first RNA molecule.

[0063] According to embodiments of the present invention, there is provided a method for inactivating a hepatitis B virus in a cell, the method comprising delivering to the cell the composition of any one of the above embodiments.

[0064] According to embodiments of the present invention, there is provided a method for treating hepatitis B comprising delivering to a cell of a subject having hepatitis B the composition of any one of the above embodiments.

[0065] According to embodiments of the present invention, there is provided a use of the composition any one of the above embodiments for inactivating a hepatitis B virus in a cell, comprising delivering to the cell the composition.

[0066] According to embodiments of the present invention, there is provided a medicament comprising the composition of any one of the above embodiments for use in inactivating a hepatitis B virus in a cell, wherein the medicament is administered by delivering to the cell the composition.

[0067] According to embodiments of the present invention, there is provided a there is provided a use of the composition any one of the above embodiments for treating ameliorating or preventing hepatitis B, comprising delivering to a cell of a subject having or at risk of having hepatitis B the composition.

[0068] According to embodiments of the present invention, there is provided a medicament comprising the composition of any one of the above embodiments for use in treating ameliorating or preventing hepatitis B, wherein the medicament is administered by delivering to a cell of a subject having or at risk of having hepatitis B the composition.

[0069] According to some embodiments of the present invention, there is provided a composition of any one of the above embodiments for use in inactivating a hepatitis B virus in a cell.

[0070] According to some embodiments of the present invention, there is provided a composition of any one of the above embodiments for use in treating ameliorating or preventing hepatitis B.

[0071] According to embodiments of the present invention, there is provided a kit for inactivating a hepatitis B virus in a cell, comprising an RNA molecule of any one of the embodiments presented herein, a CRISPR nuclease, and/or a tracrRNA molecule; and instructions for delivering the RNA molecule; CRISPR nuclease, and/or the tracrRNA to the cell.

[0072] According to embodiments of the present invention, there is provided a kit for treating hepatitis B in a subject, comprising an RNA molecule of any one of the embodiments presented herein, a CRISPR nuclease, and/or a tracrRNA molecule; and instructions for delivering the RNA molecule; CRISPR nuclease, and/or the tracrRNA to a cell of a subject having or at risk of having hepatitis B.

[0073] According to embodiments of the present invention, there is provided a HBV gene editing composition comprising an RNA molecule comprising a guide sequence portion having 17-50 contiguous nucleotides containing nucleotides in the sequence set forth in any one of SEQ ID NOs: 1-18936. In some embodiments, the RNA molecule further comprises a portion having a sequence which binds to a CRISPR nuclease. In some embodiments, the sequence which binds to a CRISPR nuclease is a tracrRNA sequence.

[0074] In some embodiments, the RNA molecule further comprises a portion having a tracr mate sequence.

[0075] In some embodiments, the RNA molecule may further comprise one or more linker portions.

[0076] According to embodiments of the present invention, an RNA molecule may be up to 1000, 900, 800, 700, 600, 500, 450, 400, 350, 300, 290, 280, 270, 260, 250, 240, 230, 220, 210, 200, 190, 180, 170, 160, 150, 140, 130, 120, 110, or 100 nucleotides in length. Each possibility represents a separate embodiment. In embodiments of the present invention, the RNA molecule may be 17 to 300 nucleotides in length, 100 to 300 nucleotides in length, 150 to 300 nucleotides in length, 100 to 500 nucleotides in length, 100 to 400 nucleotides in length, 200 to 300 nucleotides in length, 100 to 200 nucleotides in length, or 150 to 250 nucleotides in length. Each possibility represents a separate embodiment.

[0077] According to some embodiments of the present invention, the composition further comprises a tracrRNA molecule.

[0078] According to some embodiments of the present invention, there is provided a method for inactivating a hepatitis B virus in a cell, the method comprising delivering to the cell a composition comprising an RNA molecule comprising a guide sequence portion having 17-50 contiguous nucleotides containing nucleotides in the sequence set forth in any one of SEQ ID NOs: 1-18936 and a CRISPR nuclease.

[0079] According to some embodiments of the present invention, there is provided a method for treating hepatitis B, the method comprising delivering to a cell of a subject having hepatitis B a composition comprising an RNA molecule comprising a guide sequence portion having 17-50 contiguous nucleotides containing nucleotides in the sequence set forth in any one of SEQ ID NOs: 1-18936 and a CRISPR nuclease.

[0080] According to embodiments of the present invention, at least one CRISPR nuclease and the RNA molecule or RNA molecules are delivered to the subject and/or cells substantially at the same time or at different times.

[0081] In some embodiments, a tracrRNA molecule is delivered to the subject and/or cells substantially at the same time or at different times as the CRISPR nuclease and RNA molecule or RNA molecules.

[0082] According to embodiments of the present invention, there is provided a method comprising removing a sequence from a HBV genomic DNA molecule (e.g. an HBV cccDNA) or a host genomic molecule which an HBV sequence has integrated into, wherein the first RNA molecule or the first and the second RNA molecules target regions flanking the sequence to be removed.

[0083] According to embodiments of the present invention, there is provided a method comprising removing a sequence from an HBV genomic DNA molecule or a host genomic molecule which an HBV sequence has integrated into. In some embodiments, the sequence is a gene or a portion thereof. In some embodiments, the sequence is a sequence encoding a protein or a portion thereof. In some embodiments, the method is for removing an entire open reading frame of HBV genomic DNA molecule or removing an entire gene of an HBV genomic DNA molecule. In some embodiments, the sequence is a non-coding sequence of HBV or a portion thereof. In some embodiments, the sequence is a regulatory element or a portion thereof. In some embodiments, the size of the excised sequence is between 10 base pairs (bp) to 100 bp, 10 bp to 3000 bp, 100 bp to 300 bp, 100 bp to 600 bp, 100 bp to 800 bp, 100 bp to 1000 bp, 250 bp to 300 bp, 250 bp to 600 bp, 250 bp to 800 bp, 250 bp to 1000 bp, or 250 bp to 3000 bp. Each possibility represents a separate embodiment.

[0084] The compositions and methods of the present disclosure may be utilized for treating, preventing, ameliorating, or slowing progression of hepatitis B.

[0085] In some embodiments, the method of inactivating a hepatitis B virus comprises delivering two RNA guide molecules to a cell to target and inactivate an HBV gene.

[0086] Any one of, or combination of, the above-mentioned strategies for inactivating a hepatitis B virus may be used in the context of the invention.

[0087] In embodiments of the present invention, an RNA guide molecule is used to direct a CRISPR nuclease to a site in an HBV sequence in a cccDNA molecule or a host genome in order to create a double-stranded break (DSB), leading to insertion or deletion of nucleotides by inducing an error-prone non-homologous end-joining (NHEJ) mechanism and formation of a frameshift mutation. The frameshift mutation may result in, for example, inactivation or knockout of an HBV gene by generation of an early stop codon and lead to generation of a truncated protein or to nonsense-mediated mRNA decay of an HBV transcript.

[0088] According to some embodiments, the present disclosure provides an RNA guide sequence (also referred to as an ‘RNA molecule’) which binds to or associates with and/or directs an RNA-guided DNA nuclease e.g., a CRISPR nuclease, to a target sequence in the HBV genome or host genome.

[0089] In some embodiments, the method comprises contacting a site in a HBV genomic DNA molecule with an RNA guide molecule and a CRISPR nuclease e.g., a Cas9 protein, wherein the RNA guide molecule and the CRISPR nuclease associate with a nucleotide sequence of the site in a HBV genomic DNA, thereby modifying or knocking-out expression of a product encoded by the HBV genome.

[0090] In some embodiments, the RNA molecule and a CRISPR nuclease is introduced to a cell harboring a hepatitis B virus. In some embodiments, the cell is in a human subject.

[0091] In some embodiments, the method is utilized for treating a subject having a disease phenotype resulting from HBV infection. In such embodiments, the method results in improvement, amelioration or prevention of the disease phenotype.

[0092] Embodiments of compositions described herein include at least one CRISPR nuclease, RNA molecule(s), and a tracrRNA molecule, being effective in a subject or cells at the same time. The at least one CRISPR nuclease, RNA molecule(s), and tracrRNA may be delivered substantially at the same time or can be delivered at different times but have effect at the same time. For example, this includes delivering the CRISPR nuclease to the subject or cells before the RNA molecule and/or tracrRNA is substantially extant in the subject or cells.

[0093] In some embodiments, the cell is a hepatocyte or liver cell.

[0094] HBV knockout strategies include, but are not limited to, (1) truncation, for example, by targeting a sequence in a HBV genomic molecule with one guide RNA molecule to induce a frameshift or nonsense-mediated decay and (2) excision of a HBV sequence using two guide RNA molecules, for example or excision of a large portion of a HBV gene.

[0095] Truncation may be achieved by several approaches. For example, truncation may be achieved by targeting a coding sequence of an HBV genomic molecule using a single guide RNA molecule (e.g. a single guide RNA molecule or “sgRNA”). Alternatively, excision may be achieved by targeting an HBV genomic molecule with two different RNA molecules.

[0096] In some embodiments, any of the editing compositions described herein may be accompanied by small molecules that modify chromatin such as, but not limited to, methylation and deacetylation inhibitors, which can increase excision by increasing the accessibility of a DNA nuclease of the editing composition to an HBV minichromosome.

[0097] Alternatively, an editing composition comprising a nuclease (e.g. a catalytically dead CRISPR nuclease) fused to a chromatin modifier such as, but not limited to, a demethylase or a histone acetyltransferase, may increase the accessibility of the nuclease to an HBV minichromosome.

[0098] The editing composition may, for example, comprise multiple guide RNA molecules that target different sites on an HBV sequence in order to mediate excision of a regulatory element or knock-out an HBV gene from the HBV sequence.

### CRISPR Nucleases and PAM Recognition

[0099] In some embodiments, the nuclease is selected from CRISPR nucleases, or functional variants thereof. In some embodiments, the nuclease is an RNA-guided DNA nuclease. In such embodiments, the RNA sequence which guides the RNA-guided DNA nuclease (e.g., Cas9 or Cpf1) binds to and/or directs the RNA-guided DNA nuclease to a sequence within a HBV genome. In some embodiments, the CRISPR complex does not further comprise a tracrRNA. A skilled artisan will appreciate that RNA molecules can be engineered to bind to a target of choice in a genome by commonly known methods in the art.

[0100] The term “PAM” as used herein refers to a nucleotide sequence of a target DNA located in proximity to the targeted DNA sequence and recognized by the CRISPR nuclease complex. The PAM sequence may differ depending on the nuclease identity. In addition, there are CRISPR nucleases that can target almost all PAMs. In some embodiments of the present invention, a CRISPR system utilizes one or more RNA molecules having a guide sequence portion to direct a CRISPR nuclease to a target DNA site via Watson-Crick base-pairing between the guide sequence portion and the protospacer on the target DNA site, which is next to the protospacer adjacent motif (PAM), which is an additional requirement for target recognition. The CRISPR nuclease then mediates cleavage of the target DNA site to create a double-stranded break within the protospacer. In a non-limiting example, a type II CRISPR system utilizes a mature crRNA:tracrRNA complex that directs the CRISPR nuclease, e.g. Cas9 to the target DNA the target DNA via Watson-Crick base-pairing between the guide sequence portion of the crRNA and the protospacer on the target DNA next to the protospacer adjacent motif (PAM). A skilled artisan will appreciate that each of the engineered RNA molecule of the present invention is further designed such as to associate with a target genomic DNA sequence of interest next to a protospacer adjacent motif (PAM), e.g., a PAM matching the sequence relevant for the type of CRISPR nuclease utilized, such as for a non-limiting example, NGG or NAG, wherein “N” is any nucleobase, for Streptococcus pyogenes Cas9 WT (SpCAS9); NNGRRT for Staphylococcus aureus (SaCas9); NNNVRYM for Jejuni Cas9 WT; NGAN or NGNG for SpCas9-VQR variant; NGCG for SpCas9-VRER variant; NGAG for SpCas9-EQR variant; NRRH for SpCas9-NRRH variant, wherein N is any nucleobase, R is A or G and H is A, C, or T; NRTH for SpCas9-NRTH variant, wherein N is any nucleobase, R is A or G and H is A, C, or T; NRCH for SpCas9-NRCH variant, wherein N is any nucleobase, R is A or G and H is A, C, or T; NG for SpG variant of SpCas9 wherein N is any nucleobase; NG or NA for SpCas9-NG variant of SpCas9 wherein N is any nucleobase; NR or NRN or NYN for SpRY variant of SpCas9, wherein N is any nucleobase, R is A or G and Y is C or T; NNG for Streptococcus canis Cas9 variant (ScCas9), wherein N is any nucleobase; NNNRRT for SaKKH-Cas9 variant of Staphylococcus aureus (SaCas9), wherein N is any nucleobase, and R is A or G; NNNNGATT for Neisseria meningitidis (NmCas9), wherein N is any nucleobase; TTN for Alicyclobacillus acidiphilus Cas12b (AacCas12b), wherein N is any nucleobase; or TTTV for Cpf1, wherein V is A, C or G. RNA molecules of the present invention are each designed to form complexes in conjunction with one or more different CRISPR nucleases and designed to target polynucleotide sequences of interest utilizing one or more different PAM sequences respective to the CRISPR nuclease utilized.

[0101] In some embodiments, an RNA-guided DNA nuclease e.g., a CRISPR nuclease, may be used to cause a DNA break, either double or single-stranded in nature, at a desired location in the genome of a cell. The most commonly used RNA-guided DNA nucleases are derived from CRISPR systems, however, other RNA-guided DNA nucleases are also contemplated for use in the genome editing compositions and methods described herein. For instance, see U.S. Application Publication No. 2015/0211023, incorporated herein by reference.

[0102] CRISPR systems that may be used in the practice of the invention vary greatly. CRISPR systems can be a type I, a type II, or a type III system. Non-limiting examples of suitable CRISPR proteins include Cas3, Cas4, Cas5, Cas5e (or CasD), Cas6, Cas6e, Cas6f, Cas7, Cas8a1, Cas8a2, Cas8b, Cas8c, Cas9, Cas10, Cas1 Od, CasF, CasG, CasH, Csy1, Csy2, Csy3, Cse1 (or CasA), Cse2 (or CasB), Cse3 (or CasE), Cse4 (or CasC), Csc1, Csc2, Csa5, Csn2, Csm2, Csm3, Csm4, Csm5, Csm6, Cmr1, Cmr3, Cmr4, Cmr5, Cmr6, Csb1, Csb2, Csb3, Csx17, Csx14, Csx10, Csx16, CsaX, Csx3, Csz1, Csx15, Csf1, Csf2, Csf3, Csf4, and Cul966.

[0103] In some embodiments, the RNA-guided DNA nuclease is a CRISPR nuclease derived from a type II CRISPR system (e.g., Cas9). The CRISPR nuclease may be derived from Streptococcus pyogenes, Streptococcus thermophilus, Streptococcus sp., Staphylococcus aureus, Neisseria meningitidis, Treponema denticola, Nocardiopsis dassonvillei, Streptomyces pristinaespiralis, Streptomyces viridochromogenes, Streptomyces viridochromogenes, Streptosporangium roseum, Streptosporangium roseum, Alicyclobacillus acidocaldarius, Bacillus pseudomycoides, Bacillus selenitireducens, Exiguobacterium sibiricum, Lactobacillus delbrueckii, Lactobacillus salivarius, Microscilla marina, Burkholderiales bacterium, Polaromonas naphthalenivorans, Polaromonas sp., Crocosphaera watsonii, Cyanothece sp., Microcystis aeruginosa, Synechococcus sp., Acetohalobium arabaticum, Ammonifex degensii, Caldicelulosiruptor becscii, Candidatus Desulforudis, Clostridium botulinum, Clostridium difficile, Finegoldia magna, Natranaerobius thermophilus, Pelotomaculum thermopropionicum, Acidithiobacillus caldus, Acidithiobacillus ferrooxidans, Allochromatium vinosum, Marinobacter sp., Nitrosococcus halophilus, Nitrosococcus watsoni, Pseudoalteromonas haloplanktis, Ktedonobacter racemifer, Methanohalobium evestigatum, Anabaena variabilis, Nodularia spumigena, Nostoc sp., Arthrospira maxima, Arthrospira platensis, Arthrospira sp., Lyngbya sp., Microcoleus chthonoplastes, Oscillatoria sp., Petrotoga mobilis, Thermosipho africanus, Acaryochloris marina, or any species which encodes a CRISPR nuclease with a known PAM sequence. CRISPR nucleases encoded by uncultured bacteria may also be used in the context of the invention. (See Burstein et al. Nature, 2017). Variants of CRIPSR proteins having known PAM sequences e.g., SpCas9 D1135E variant, SpCas9 VQR variant, SpCas9 EQR variant, or SpCas9 VRER variant may also be used in the context of the invention.

[0104] Thus, an RNA-guided DNA nuclease of a CRISPR system, such as a Cas9 protein or modified Cas9 or homolog or ortholog of Cas9, or other RNA-guided DNA nucleases belonging to other types of CRISPR systems, such as Cpf1 and its homologs and orthologs, may be used in the compositions of the present invention. Additional CRISPR nucleases may also be used, for example, the nucleases described in PCT International Application Publication Nos. WO2020/223514 and WO2020/223553, which are hereby incorporated by reference.

[0105] In certain embodiments, the CRIPSR nuclease may be a “functional derivative” of a naturally occurring Cas protein. A “functional derivative” of a native sequence polypeptide is a compound having a qualitative biological property in common with a native sequence polypeptide. “Functional derivatives” include, but are not limited to, fragments of a native sequence and derivatives of a native sequence polypeptide and its fragments, provided that they have a biological activity in common with a corresponding native sequence polypeptide. A biological activity contemplated herein is the ability of the functional derivative to hydrolyze a DNA substrate into fragments. The term “derivative” encompasses both amino acid sequence variants of polypeptide, covalent modifications, and fusions thereof. Suitable derivatives of a Cas polypeptide or a fragment thereof include but are not limited to mutants, fusions, covalent modifications of Cas protein or a fragment thereof. Cas protein, which includes Cas protein or a fragment thereof, as well as derivatives of Cas protein or a fragment thereof, may be obtainable from a cell or synthesized chemically or by a combination of these two procedures. The cell may be a cell that naturally produces Cas protein, or a cell that naturally produces Cas protein and is genetically engineered to produce the endogenous Cas protein at a higher expression level or to produce a Cas protein from an exogenously introduced nucleic acid, which nucleic acid encodes a Cas that is same or different from the endogenous Cas. In some cases, the cell does not naturally produce Cas protein and is genetically engineered to produce a Cas protein.

[0106] In some embodiments, the CRISPR nuclease is Cpf1. Cpf1 is a single RNA-guided endonuclease which utilizes a T-rich protospacer-adjacent motif. Cpf1 cleaves DNA via a staggered DNA double-stranded break. Two Cpf1 enzymes from Acidaminococcus and Lachnospiraceae have been shown to carry out efficient genome-editing activity in human cells. (See Zetsche et al., 2015).

[0107] Thus, an RNA-guided DNA nuclease of a Type II CRISPR System, such as a Cas9 protein or modified Cas9 or homologs, orthologues, or variants of Cas9, or other RNA-guided DNA nucleases belonging to other types of CRISPR systems, such as Cpf1 and its homologs, orthologues, or variants, may be used in the present invention.

[0108] In some embodiments, the guide molecule comprises one or more chemical modifications which imparts a new or improved property (e.g., improved stability from degradation, improved hybridization energetics, or improved binding properties with an RNA-guided DNA nuclease). Suitable chemical modifications include, but are not limited to: modified bases, modified sugar moieties, or modified inter-nucleoside linkages. Non-limiting examples of suitable chemical modifications include: 4-acetylcytidine, 5-(carboxyhydroxymethyl)uridine, 2′-O-methylcytidine, 5-carboxymethylaminomethyl-2-thiouridine, 5-carboxymethylaminomethyluridine, dihydrouridine, 2′-O-methylpseudouridine, “beta, D-galactosylqueuosine”, 2′-O-methylguanosine, inosine, N6-isopentenyladenosine, 1-methyladenosine, 1-methylpseudouridine, 1-methylguanosine, 1-methylinosine, “2,2-dimethylguanosine”, 2-methyladenosine, 2-methylguanosine, 3-methylcytidine, 5-methylcytidine, N6-methyladenosine, 7-methylguanosine, 5-methylaminomethyluridine, 5-methoxyaminomethyl-2-thiouridine, “beta, D-5-mannosylqueuosine”, 5-methoxycarbonylmethyl-2-thiouridine, 5-methoxycarbonylmethyluridine, 5-methoxyuridine, 2-methylthio-N6-isopentenyladenosine, N-((9-beta-D-ribofuranosyl-2-methylthiopurine-6-yl) carbamoyl)threonine, N-((9-beta-D-ribofuranosylpurine-6-yl)N-methylcarbamoyl)threonine, uridine-5-oxyacetic acid-methylester, uridine-5-oxyacetic acid, wybutoxosine, queuosine, 2-thiocytidine, 5-methyl-2-thiouridine, 2-thiouridine, 4-thiouridine, 5-methyluridine, N-((9-beta-D-ribofuranosylpurine-6-yl)-carbamoyl)threonine, 2′-O-methyl-5-methyluridine, 2′-O-methyluridine, wybutosine, “3-(3-amino-3-carboxy-propyl)uridine, (acp3)u”, 2′-0-methyl (M), 3′-phosphorothioate (MS), 3′-thioPACE (MSP), pseudouridine, or 1-methyl pseudo-uridine. Each possibility represents a separate embodiment of the present invention.

### Delivery to Cells

[0109] The compositions described herein may be delivered to a target cell by any suitable means. Compositions of the present invention may be targeted to any cell which contains HBV and/or expresses an HBV product. For example, in one embodiment the RNA molecule specifically targets a site in an HBV genome and the target cell is a hepatocyte harboring the HBV. The delivery to the cell may be performed in-vitro, ex-vivo, or in-vivo. Further, the nucleic acid compositions described herein may be delivered as one or more of DNA molecules, RNA molecules, ribonucleoproteins (RNPs), nucleic acid vectors, or any combination thereof.

[0110] In some embodiments, any one of the compositions described herein is delivered to a cell in-vivo. In some embodiments, the cell is a hepatocyte. In some embodiments, the composition is delivered to the liver of a subject. The composition may be delivered to the cell by any known in-vivo delivery method, including but not limited to, viral transduction, for example, using a lentivirus or adeno-associated virus (AAV), nanoparticle delivery, etc. Additional detailed delivery methods are described throughout this section. Non-limiting examples of suitable AAV serotypes include AAV8 hepatotropic AAV LK03.

[0111] In some embodiments, any one of the compositions described herein is delivered to a cell ex-vivo. In some embodiments, the cell is a hepatocyte. The composition may be delivered to the cell by any known ex-vivo delivery method, including but not limited to, nucleofection, electroporation, viral transduction, for example, using a lentivirus or adeno-associated virus (AAV), nanoparticle delivery, liposomes, etc. Additional detailed delivery methods are described throughout this section.

[0112] In some embodiments, an RNA molecule in the composition comprises a chemical modification. Non-limiting examples of suitable chemical modifications include 2′-0-methyl (M), 2′-0-methyl, 3′phosphorothioate (MS) or 2′-0-methyl, 3′thioPACE (MSP), pseudouridine, and 1-methyl pseudo-uridine. Each possibility represents a separate embodiment of the present invention.

[0113] Any suitable viral vector system may be used to deliver nucleic acid compositions e.g., RNA molecules within compositions of the subject invention. Conventional viral and non-viral based gene transfer methods can be used to introduce nucleic acids and target tissues. In certain embodiments, nucleic acids are administered for in vivo or ex vivo gene therapy uses. Non-viral vector delivery systems include naked nucleic acid, and nucleic acid complexed with a delivery vehicle such as a liposome or poloxamer. The template molecule delivered for use during HDR may be, for example, adenovirus-associated vector (AAV)-based, a single-stranded donor oligonucleotide (ssODN), or a PCR-generated double-stranded DNA molecule. Such templates may be delivered by, for example, lipid nanoparticles (LNPs). Alternatively, RNA template molecules may be delivered by, for example, a lentivirus-based delivery system.

[0114] For a review of gene therapy procedures, see Anderson (1992); Nabel & Felgner (1993); Mitani & Caskey (1993); Dillon (1993); Miller (1992); Van Brunt (1988); Vigne (1995); Kremer & Perricaudet (1995); Haddada et al. (1995); and Yu et al. (1994).

[0115] Methods of non-viral delivery of nucleic acids and/or proteins include electroporation, lipofection, microinjection, biolistics, particle gun acceleration, virosomes, liposomes, immunoliposomes, lipid nanoparticles (LNPs), polycation or lipid:nucleic acid conjugates, artificial virions, and agent-enhanced uptake of nucleic acids or can be delivered to plant cells by bacteria or viruses (e.g., Agrobacterium, Rhizobium sp. NGR234, Sinorhizoboiummeliloti, Mesorhizobium loti, tobacco mosaic virus, potato virus X, cauliflower mosaic virus and cassava vein mosaic virus). (See, e.g., Chung et al., 2006). Sonoporation using, e.g., the Sonitron 2000 system (Rich-Mar), can also be used for delivery of nucleic acids. Cationic-lipid mediated delivery of proteins and/or nucleic acids is also contemplated as an in vivo, ex vivo, or in vitro delivery method. (See Zuris et al. (2015); see also Coelho et al. (2013); Judge et al. (2006); and Basha et al. (2011)).

[0116] Non-viral vectors, such as transposon-based systems e.g. recombinant Sleeping Beauty transposon systems or recombinant PiggyBac transposon systems, may also be delivered to a target cell and utilized for transposition of a polynucleotide sequence of a molecule of the composition or a polynucleotide sequence encoding a molecule of the composition in the target cell.

[0117] Additional exemplary nucleic acid delivery systems include those provided by Amaxa®. Biosystems (Cologne, Germany), Maxcyte, Inc. (Rockville, Md.), BTX Molecular Delivery Systems (Holliston, Mass.) and Copernicus Therapeutics Inc., (see, e.g., U.S. Pat. No. 6,008,336). Lipofection is described in e.g., U.S. Pat. Nos. 5,049,386, 4,946,787; and 4,897,355, and lipofection reagents are sold commercially (e.g., Transfectam™, Lipofectin™ and Lipofectamine™ RNAiMAX). Cationic and neutral lipids that are suitable for efficient receptor-recognition lipofection of polynucleotides include those disclosed in PCT International Publication Nos. WO/1991/017424 and WO/1991/016024. Delivery can be to cells (ex vivo administration) or target tissues (in vivo administration).

[0118] The preparation of lipid:nucleic acid complexes, including targeted liposomes such as immunolipid complexes, is well known to one of skill in the art (see, e.g., Crystal, Science (1995); Blaese et al., (1995); Behr et al., (1994); Remy et al. (1994); Gao and Huang (1995); Ahmad and Allen (1992); U.S. Pat. Nos. 4,186,183; 4,217,344; 4,235,871; 4,261,975; 4,485,054; 4,501,728; 4,774,085; 4,837,028; and 4,946,787).

[0119] Additional methods of delivery include the use of packaging the nucleic acids to be delivered into EnGeneIC delivery vehicles (EDVs). These EDVs are specifically delivered to target tissues using bispecific antibodies where one arm of the antibody has specificity for the target tissue and the other has specificity for the EDV. The antibody brings the EDVs to the target cell surface and then the EDV is brought into the cell by endocytosis. Once in the cell, the contents are released (See MacDiarmid et al., 2009).

[0120] The use of RNA or DNA viral based systems for viral mediated delivery of nucleic acids take advantage of highly evolved processes for targeting a virus to specific cells in the body and trafficking the viral payload to the nucleus. Viral vectors can be administered directly to patients (in vivo) or they can be used to treat cells in vitro and the modified cells are administered to patients (ex vivo). Conventional viral based systems for the delivery of nucleic acids include, but are not limited to, retroviral, lentivirus, adenoviral, adeno-associated, vaccinia and herpes simplex virus vectors for gene transfer.

[0121] The tropism of a retrovirus can be altered by incorporating foreign envelope proteins, expanding the potential target population of target cells. Lentiviral vectors are retroviral vectors that are able to transduce or infect non-dividing cells and typically produce high viral titers. Selection of a retroviral gene transfer system depends on the target tissue. Retroviral vectors are comprised of cis-acting long terminal repeats with packaging capacity for up to 6-10 kb of foreign sequence. The minimum cis-acting LTRs are sufficient for replication and packaging of the vectors, which are then used to integrate the therapeutic gene into the target cell to provide permanent transgene expression. Widely used retroviral vectors include those based upon murine leukemia virus (MuLV), gibbon ape leukemia virus (GaLV), Simian Immunodeficiency virus (SIV), human immunodeficiency virus (HIV), and combinations thereof (See, e.g., Buchschacher et al. (1992); Johann et al. (1992); Sommerfelt et al. (1990); Wilson et al. (1989); Miller et al. (1991); PCT International Publication No. WO/1994/026877A1).

[0122] At least six viral vector approaches are currently available for gene transfer in clinical trials, which utilize approaches that involve complementation of defective vectors by genes inserted into helper cell lines to generate the transducing agent.

[0123] pLASN and MFG-S are examples of retroviral vectors that have been used in clinical trials (See Dunbar et al., 1995; Kohn et al., 1995; Malech et al., 1997). PA317/pLASN was the first therapeutic vector used in a gene therapy trial (Blaese et al., 1995). Transduction efficiencies of 50% or greater have been observed for MFG-S packaged vectors. (Ellem et al., (1997); Dranoff et al., 1997).

[0124] Packaging cells are used to form virus particles that are capable of infecting a host cell. Such cells include 293 cells, which package adenovirus, AAV, and Psi-2 cells or PA317 cells, which package retrovirus. Viral vectors used in gene therapy are usually generated by a producer cell line that packages a nucleic acid vector into a viral particle. The vectors typically contain the minimal viral sequences required for packaging and subsequent integration into a host (if applicable), other viral sequences being replaced by an expression cassette encoding the protein to be expressed. The missing viral functions are supplied in trans by the packaging cell line. For example, AAV vectors used in gene therapy typically only possess inverted terminal repeat (ITR) sequences from the AAV genome which are required for packaging and integration into the host genome. Viral DNA is packaged in a cell line, which contains a helper plasmid encoding the other AAV genes, namely rep and cap, but lacking ITR sequences. The cell line is also infected with adenovirus as a helper. The helper virus promotes replication of the AAV vector and expression of AAV genes from the helper plasmid. The helper plasmid is not packaged in significant amounts due to a lack of ITR sequences. Contamination with adenovirus can be reduced by, e.g., heat treatment to which adenovirus is more sensitive than AAV. Additionally, AAV can be produced at clinical scale using baculovirus systems (see U.S. Pat. No. 7,479,554).

[0125] In many gene therapy applications, it is desirable that the gene therapy vector be delivered with a high degree of specificity to a particular tissue type. Accordingly, a viral vector can be modified to have specificity for a given cell type by expressing a ligand as a fusion protein with a viral coat protein on the outer surface of the virus. The ligand is chosen to have affinity for a receptor known to be present on the cell type of interest. For example, Han et al. (1995) reported that Moloney murine leukemia virus can be modified to express human heregulin fused to gp70, and the recombinant virus infects certain human breast cancer cells expressing human epidermal growth factor receptor. This principle can be extended to other virus-target cell pairs, in which the target cell expresses a receptor and the virus expresses a fusion protein comprising a ligand for the cell-surface receptor. For example, filamentous phage can be engineered to display antibody fragments (e.g., FAB or Fv) having specific binding affinity for virtually any chosen cellular receptor. Although the above description applies primarily to viral vectors, the same principles can be applied to nonviral vectors. Such vectors can be engineered to contain specific uptake sequences which favor uptake by specific target cells.

[0126] Gene therapy vectors can be delivered in vivo by administration to an individual patient, typically by systemic administration (e.g., intravitreal, intravenous, intraperitoneal, intramuscular, subdermal, or intracranial infusion) or topical application, as described below. Alternatively, vectors can be delivered to cells ex vivo, such as cells explanted from an individual patient (e.g., lymphocytes, bone marrow aspirates, tissue biopsy) or universal donor hematopoietic stem cells, followed by reimplantation of the cells into a patient, optionally after selection for cells which have incorporated the vector. A non-limiting exemplary ex vivo approach may involve removal of tissue (e.g., peripheral blood, bone marrow; and spleen) from a patient for culture, nucleic acid transfer to the cultured cells (e.g., hematopoietic stem cells), followed by grafting the cells to a target tissue (e.g., bone marrow, and spleen) of the patient. In some embodiments, the stem cell or hematopoietic stem cell may be further treated with a viability enhancer.

[0127] Ex vivo cell transfection for diagnostics, research, or for gene therapy (e.g., via re-infusion of the transfected cells into the host organism) is well known to those of skill in the art. In a preferred embodiment, cells are isolated from the subject organism, transfected with a nucleic acid composition, and re-infused back into the subject organism (e.g., patient). Various cell types suitable for ex vivo transfection are well known to those of skill in the art (See, e.g., Freshney, “Culture of Animal Cells, A Manual of Basic Technique and Specialized Applications (6th edition, 2010) and the references cited therein for a discussion of how to isolate and culture cells from patients).

[0128] Suitable cells include, but are not limited to, eukaryotic cells and/or cell lines. Non-limiting examples of such cells or cell lines generated from such cells include COS, CHO (e.g., CHO-S, CHO-K1, CHO-DG44, CHO-DUXB11, CHO-DUKX, CHOK1SV), VERO, MDCK, WI38, V79, B14AF28-G3, BHK, HaK, NSO, SP2/0)-Ag14, HeLa, HEK293 (e.g., HEK293-F, HEK293-H, HEK293-T), perC6 cells, any plant cell (differentiated or undifferentiated), as well as insect cells such as Spodopterafugiperda (Sf), or fungal cells such as Saccharomyces, Pichia and Schizosaccharomyces. In certain embodiments, the cell line is a CHO-K1, MDCK or HEK293 cell line. Additionally, primary cells may be isolated and used ex vivo for reintroduction into the subject to be treated following treatment with a guided nuclease system (e.g. CRISPR/Cas). Suitable primary cells include peripheral blood mononuclear cells (PBMC), and other blood cell subsets such as, but not limited to, CD4+ T cells or CD8+ T cells. Suitable cells also include stem cells such as, by way of example, embryonic stem cells, induced pluripotent stem cells, hematopoietic stem cells (CD34+), neuronal stem cells and mesenchymal stem cells.

[0129] In one embodiment, stem cells are used in ex vivo procedures for cell transfection and gene therapy. The advantage to using stem cells is that they can be differentiated into other cell types in vitro, or can be introduced into a mammal (such as the donor of the cells) where they will engraft in the bone marrow. Methods for differentiating CD34+ cells in vitro into clinically important immune cell types using cytokines such a GM-CSF, IFN-gamma, and TNF-alpha are known (as a non-limiting example see, Inaba et al., 1992).

[0130] Stem cells are isolated for transduction and differentiation using known methods. For example, stem cells are isolated from bone marrow cells by panning the bone marrow cells with antibodies which bind unwanted cells, such as CD4+ and CD8+ (T cells), CD45+ (panB cells), GR-1 (granulocytes), and lad (differentiated antigen presenting cells) (as a non-limiting example, see Inaba et al., 1992). Stem cells that have been modified may also be used in some embodiments.

[0131] Vectors (e.g., retroviruses, liposomes, etc.) containing therapeutic nucleic acid compositions can also be administered directly to an organism for transduction of cells in vivo. Administration is by any of the routes normally used for introducing a molecule into ultimate contact with blood or tissue cells including, but not limited to, injection, infusion, and electroporation. Suitable methods of administering such nucleic acids are available and well known to those of skill in the art, and, although more than one route can be used to administer a particular composition, a particular route can often provide a more immediate and more effective reaction than another route. According to some embodiments, the composition is delivered via IV injection.

[0132] Vectors suitable for introduction of transgenes into immune cells (e.g., T-cells) include non-integrating lentivirus vectors. See, e.g., U.S. Application Publication No. 2009/0117617.

[0133] Pharmaceutically acceptable carriers are determined in part by the particular composition being administered, as well as by the particular method used to administer the composition. Accordingly, there is a wide variety of suitable formulations of pharmaceutical compositions available, as described below (See, e.g., Remington's Pharmaceutical Sciences, 17th ed., 1989).

[0134] The disclosed compositions and methods may also be used in the manufacture of a medicament for treating hepatitis B in a patient.

### Mechanisms of Action for HBV Knockout Methods

[0135] Without being bound by any theory or mechanism, the instant invention may be utilized to apply a CRISPR nuclease to affect a DNA break in a HBV genomic DNA molecule, such as to prevent its replication and prevent expression from the HBV genomic DNA molecule, in order to prevent or treat hepatitis B. A specific guide portion sequence may be selected from Table 1 based on the targeted HBV sequence and the type of CRISPR nuclease used (required PAM sequence). Alternatively, an HBV sequence that has integrated into a host genome may be targeted such that the CRISPR nuclease affects a DNA break on the host genome.

[0136] One strategy to knockout an HBV gene is to target an HBV sequence using one RNA molecule in order to mediate truncation or nonsense mediated decay (NMD). As a non-limiting example, a frameshift in a HBV may be introduced by utilizing one RNA molecule to target a CRISPR nuclease to a HBV coding sequence to mediate a double-strand break, which leads to generation of a frameshift mutation and expression of a truncated protein or nonsense mediated decay (NMD) of a HBV transcript.

[0137] Alternatively, an HBV gene may be knocked-out by an excision strategy that utilizes two RNA molecules. Same strategy may be implemented to excise regulatory elements that would prevent the replication of the HBV genome.

[0138] An editing composition comprising a nuclease (e.g. a catalytically dead CRISPR nuclease) fused to a chromatin modifier such as, but not limited to, a demethylase or a histone acetyltransferase, may increase the accessibility of the nuclease to an HBV minichromosome.

[0139] Alternatively, any of the editing compositions described herein may be accompanied by small molecules that modify chromatin such as, but not limited to, methylation and deacetylation inhibitors, which can increase excision by increasing the accessibility of a DNA nuclease of the editing composition to an HBV minichromosome.

[0140] One or more editing compositions comprising multiple guide RNA molecules that target multiple sites on an HBV sequence may be utilized, for example, to mediate excision of a portion of the HBV sequence (e.g. a regulatory element) or knock-out an HBV gene from the HBV sequence.

[0141] In some embodiments, the one or more editing compositions are delivered to a cell by one or more delivery vehicles. As a non-limiting example, two guide RNA molecules having different guide sequence portions and at least one CRISPR nuclease may be delivered to a cell such that a first guide RNA molecule that targets a first site is delivered by a first delivery vehicle (e.g. a first AAV particle) and a second guide RNA molecule that targets a second site is delivered by a second delivery vehicle (e.g. a second AAV particle). In another example, guide RNA molecules having different guide sequence portions are delivered to a cell by a first delivery vehicle, and at least one CRISPR nuclease, or a nucleic acid encoding the at least one CRISPR nuclease, is delivered to the cell by a second delivery vehicle. Furthermore, an first editing composition comprising a first CRISPR nuclease-RNA guide complex may be delivered to a cell by a first delivery vehicle, and a second editing composition comprising a second CRISPR nuclease-RNA guide complex may be delivered to the cell by a second delivery vehicle.

### Examples of RNA Guide Sequences Which Specifically Target HBV

[0142] Table 1 shows guide sequence portions designed to specifically target the HBV genome. Each engineered guide molecule is further designed such as to associate with a target genomic DNA sequence of interest that lies next to a protospacer adjacent motif (PAM), e.g., a PAM matching the sequence NGG or NAG, where “N” is any nucleobase. The guide sequences were designed to work in conjunction with one or more different CRISPR nucleases, including, but not limited to, e.g. SpCas9WT (PAM SEQ: NGG), SpCas9.VQR.1 (PAM SEQ: NGAN), SpCas9.VQR.2 (PAM SEQ: NGNG), SpCas9.EQR (PAM SEQ: NGAG), SpCas9.VRER (PAM SEQ: NGCG), SaCas9WT (PAM SEQ: NNGRRT), SpRY (PAM SEQ: NRN or NYN), NmCas9WT (PAM SEQ: NNNNGATT), Cpf1 (PAM SEQ: TTTV), or JeCas9WT (PAM SEQ: NNNVRYM). RNA molecules of the present invention are each designed to form complexes in conjunction with one or more different CRISPR nucleases and designed to target polynucleotide sequences of interest utilizing one or more different PAM sequences respective to the CRISPR nuclease utilized.

TABLE 1
Guide sequence portions designed to
associate with specific HBV targets

| | SEQ ID NOs: | SEQ ID NOs: | SEQ ID NOs: |
|---|---|---|---|
| Target | of 20 base guides | of 21 base guides | of 22 base guides |
| HBV genome | 1-6314 | 6315-12626 | 12627-18936 |
| position 1-3182 | | | |

[0143] Examples are provided below to facilitate a more complete understanding of the invention. The following examples illustrate the exemplary modes of making and practicing the invention. However, the scope of the invention is not limited to specific embodiments disclosed in these Examples, which are for purposes of illustration only.

### EXPERIMENTAL DETAILS

### Example 1: HBV Guide Sequence Portion Screening

[0144] To identify optimal guide molecules for targeting conserved HBV sequences, HeLa cells were stably infected with lentiviruses harboring synthetic sequences of relevant regions of the HBV genome (FIG. 1). In hepatocyte nuclei, hepatitis B virus (HBV) genomes exist episomally in the form of covalently closed circular DNA (cccDNA). Since there is a variable copy number of HBV cccDNA molecules in each cell (typically up to 10 copies per cell), HeLa cells were infected with lentivirus harboring the synthetic sequence of HBV at three different multiplicities of infection (MOI) i.e. 2, 5, or 10 copies per cell. Stably infected cells were selected based on puromycin resistance.

[0145] Four different guide molecules targeting distinct regions in the HBV DNA were screened for high on-target activity in HBV-infected HeLa cells (Table 2) by WT OMNI-79 nuclease and the OMNI-79 V5570 variant nuclease. Briefly, the screen was performed in 96-well format with a WT OMNI-79 or an OMNI-79 V5570 nuclease (64 ng) co-transfected with each of the guides (20 ng) using JetOPTIMUS reagent (Polyplus). Cell were harvested 72 hours post DNA transfection. Cell lysis and genomic DNA extraction was performed in Quick extract (Lucigen) and endogenous genomic regions were amplified using specific primers in order to measure on-target activity by next generation sequencing (NGS) (FIG. 2, Table 2).

TABLE 2
HBV-targeting guide sequence portions

| Target | Guide | Guide | |
|---|---|---|---|
| Location | Name | Sequence Portions | PAM |
| Segment 2 | s48 | CAGAAGAACCAACAAGAAGAUG | AGGCAT |
| | | (SEQ ID NO: 14469) | |
| Segment 3 | s38 | GCCAUUUGUUCAGUGGUUCGUA | GGGCTT |
| | | (SEQ ID NO: 16323) | |
| Segment 3 | s46 | GCCCUACGAACCACUGAACAAA | TGGCAC |
| | | (SEQ ID NO: 16342) | |
| Segment 4 | s50 | CUAGGAGUUCCGCAGUAUGGAU | CGGCAG |
| | | (SEQ ID NO: 15393) | |

TABLE 3
OMNI CRISPR Nuclease and compatible sgRNA Scaffold sequences

| OMNI | | | |
|---|---|---|---|
| CRISPR | Amino Acid Sequence | | |
| Nuclease | of the OMNI CRISPR | PAM | Compatible sgRNA |
| Name | Nuclease | Sequence | Scaffold Sequence |
| WT OMNI-79 | SEQ ID NO: 18943 | NGG | GUUGCCGCUGGAGAAAUCCAGUU |
| | | | GUUAACAAGCAGCUUGACUGCAC |
| | | | CAAAUAAGGCGGGGGCUGCGGCC |
| | | | CUCGCUUUUUU (SEQ ID NO: |
| | | | 18945) |
| OMNI-79 | SEQ ID NO: 18944 | NGG | GUUGCCGCUGGAGAAAUCCAGUU |
| V5570 Variant | | | GUUAACAAGCAGCUUGACUGCAC |
| | | | CAAAUAAGGCGGGGGCUGCGGCC |
| | | | CUCGCUUUUUU (SEQ ID NO: |
| | | | 18945) |

### REFERENCES

[0146] 1. Ahmad and Allen (1992) “Antibody-mediated Specific Binging and Cytotoxicity of Lipsome-entrapped Doxorubicin to Lung Cancer Cells in Vitro”, Cancer Research 52:4817-20.
[0147] 2. Anderson (1992) “Human gene therapy”, Science 256:808-13.
[0148] 3. Agulo (2013) “Phosphoinositide 3-kinase δ gene mutation predisposes to respiratory infection and airway damage”, Science 342:866-8671.
[0149] 4. Basha et al. (2011) “Influence of Cationic Lipid Composition on Gene Silencing Properties of Lipid Nanoparticle Formulations of siRNA in Antigen-Presenting Cells”, Mol. Ther. 19(12):2186-200.
[0150] 5. Behr (1994) Gene transfer with synthetic cationic amphiphiles: Prospects for gene therapy”, Bioconjuage Chem 5:382-89.
[0151] 6. Blaese (1995) “Vectors in cancer therapy: how will they deliver”, Cancer Gene Ther. 2:291-97.
[0152] 7. Blaese et al. (1995) “T lympocyte-directed gene therapy for ADA-SCID: initial trial results after 4 years”, Science 270(5235):475-80.
[0153] 8. Buchschacher and Panganiban (1992) “Human immunodeficiency virus vectors for inducible expression of foreign genes”, J. Virol. 66:2731-39.
[0154] 9. Burstein et al. (2017) “New CRISPR-Cas systems from uncultivated microbes”, Nature 542:237-41.
[0155] 10. Chang and Wilson (1987) “Modification of DNA ends can decrease end-joining relative to homologous recombination in mammalian cells”, Proc. Natl. Acad. Sci. USA 84:4959-4963.
[0156] 11. Chung et al. (2006) “Agrobacterium is not alone: gene transfer to plants by viruses and other bacteria”, Trends Plant Sci. 11(1):1-4.
[0157] 12. Coelho et al. (2013) “Safety and efficacy of RNAi therapy for transthyretin amyloidosis” N. Engl. J. Med. 369, 819-829.
[0158] 13. Collias and Beisel (2021) “CRISPR technologies and the search for the PAM-free nuclease”, Nature Communications 12, 555.
[0159] 14. Crystal (1990) “Alpha 1-antitrypsin deficiency, emphasema, and liver disease. Genetic basis and strategies for therapy.” J. Clin. Invest. 85(5): 1343-1352.
[0160] 15. Crystal (1995) “Transfer of genes to humans: early lessons and obstacles to success”, Science 270(5235):404-10.
[0161] 16. Dillon (1993) “Regulation gene expression in gene therapy” Trends in Biotechnology 11(5):167-173.
[0162] 17. Dranoff et al. (1997) “A phase I study of vaccination with autologous, irradiated melanoma cells engineered to secrete human granulocyte macrophage colony stimulating factor”, Hum. Gene Ther. 8(1):111-23.
[0163] 18. Dunbar et al. (1995) “Retrovirally marked CD34-enriched peripheral blood and bone marrow cells contribute to long-term engraftment after autologous transplantation”, Blood 85:3048-57.
[0164] 19. Ellem et al. (1997) “A case report: immune responses and clinical course of the first human use of ganulocyte/macrophage-colony-stimulating-factor-tranduced autologous melanoma cells for immunotherapy”, Cancer Immunol Immunother 44:10-20.
[0165] 20. Gao and Huang (1995) “Cationic liposome-mediated gene transfer” Gene Ther. 2(10):710-22.
[0166] 21. Haddada et al. (1995) “Gene Therapy Using Adenovirus Vectors”, in: The Molecular Repertoire of Adenoviruses III: Biology and Pathogenesis, ed. Doerfler and Böhm, pp. 297-306.
[0167] 22. Han et al. (1995) “Ligand-directed retro-viral targeting of human breast cancer cells”, Proc Natl Acad Sci U.S.A. 92(21):9747-51.
[0168] 23. Hu et al. (2018) “Evolved Cas9 variants with broad PAM compatibility and high DNA specificity”, Nature 556(7699):57-63.
[0169] 24. Inaba et al. (1992) “Generation of large numbers of dendritic cells from mouse bone marrow cultures supplemented with granulocyte/macrophage colony-stimulating factor”, J Exp Med. 176(6):1693-702.
[0170] 25. Jinek et al. (2012) “A programmable dual-RNA-guided DNA endonuclease in adaptive bacterial immunity,” Science 337(6096):816-21.
[0171] 26. Johan et al. (1992) “GLVR1, a receptor for gibbon ape leukemia virus, is homologous to a phosphate permease of Neurospora crassa and is expressed at high levels in the brain and thymus”, J Virol 66(3):1635-40.
[0172] 27. Judge et al. (2006) “Design of noninflammatory synthetic siRNA mediating potent gene silencing in vivo”, Mol Ther. 13(3):494-505.
[0173] 28. Kohn et al. (1995) “Engraftment of gene-modified umbilical cord blood cells in neonates with adnosine deaminase deficiency”, Nature Medicine 1:1017-23.
[0174] 29. Kremer and Perricaudet (1995) “Adenovirus and adeno-associated virus mediated gene transfer”, Br. Med. Bull. 51(1):31-44.
[0175] 30. Macdiarmid et al. (2009) “Sequential treatment of drug-resistant tumors with targeted minicells containing siRNA or a cytotoxic drug”, Nat Biotechnol. 27(7):643-51.
[0176] 31. Malech et al. (1997) “Prolonged production of NADPH oxidase-corrected granulocyes after gene therapy of chronic granulomatous disease”, PNAS 94(22):12133-38.
[0177] 32. Miller et al. (1991) “Construction and properties of retrovirus packaging cells based on gibbon ape leukemia virus”, J Virol. 65(5):2220-24.
[0178] 33. Miller (1992) “Human gene therapy comes of age”, Nature 357:455-60.
[0179] 34. Mitani and Caskey (1993) “Delivering therapeutic genes-matching approach and application”, Trends in Biotechnology 11(5):162-66.
[0180] 35. Nabel and Felgner (1993) “Direct gene transfer for immunotherapy and immunization”, Trends in Biotechnology 11(5):211-15.
[0181] 36. Nishimasu et al. (2018) “Engineered CRISPR-Cas9 nuclease with expanded targeting space”, Science 361(6408):1259-1262.
[0182] 37. Remy et al. (1994) “Gene Transfer with a Series of Lipphilic DNA-Binding Molecules”, Bioconjugate Chem. 5(6):647-54.
[0183] 38. Sentmanat et al. (2018) “A Survey of Validation Strategies for CRISPR-Cas9 Editing”, Scientific Reports 8:888, doi:10.1038/s41598-018-19441-8.
[0184] 39. Sommerfelt et al. (1990) “Localization of the receptor gene for type D simian retroviruses on human chromosome 19”, J. Virol. 64(12):6214-20.
[0185] 40. Van Brunt (1988) “Molecular framing: transgenic animals as bioactors” Biotechnology 6:1149-54.
[0186] 41. Vigne et al. (1995) “Third-generation adenovectors for gene therapy”, Restorative Neurology and Neuroscience 8(1,2): 35-36.
[0187] 42. Walton et al. (2020) “Unconstrained genome targeting with near-PAMless engineered CRISPR-Cas9 variants”, Science 368(6488):290-296.
[0188] 43. Weissman and Kariko (2015) “mRNA:Fulfilling the promise of gene therapy”, Molecular Therapy (9):1416-7.
[0189] 44. Wilson et al. (1989) “Formation of infectious hybrid virion with gibbon ape leukemia virus and human T-cell leukemia virus retroviral envelope glycoproteins and the gag and pol proteins of Moloney murine leukemia virus”, J. Virol. 63:2374-78.
[0190] 45. Yu et al. (1994) “Progress towards gene therapy for HIV infection”, Gene Ther. 1(1):13-26.
[0191] 46. Zetsche et al. (2015) “Cpf1 is a single RNA-guided endonuclease of a class 2 CRIPSR-Cas system” Cell 163(3):759-71.
[0192] 47. Zuris et al. (2015) “Cationic lipid-mediated delivery of proteins enables efficient protein based genome editing in vitro and in vivo” Nat Biotechnol. 33(1):73-80.

1. A method for modifying a hepatitis B virus (HBV) sequence in a cell, the method comprising
introducing to the cell a composition comprising:
at least one CRISPR nuclease or a nucleotide sequence encoding a CRISPR nuclease; and
a first RNA molecule comprising a guide sequence portion having 17-50 nucleotides in the sequence set forth in any one of SEQ ID NOs: 1-18936 or a nucleotide sequence encoding the same,
wherein a complex of the CRISPR nuclease and the first RNA molecule affects a double strand break in the HBV sequence.

2. (canceled)

3. The method of claim 1, wherein the double-strand break is affected in a sequence of an HBV gene or portion thereof, an HBV coding sequence or portion thereof, an HBV regulatory sequence or portion thereof, and/or a conserved HBV sequence.

4. The method of claim 1, further comprising introducing to the cell a second RNA molecule comprising a guide sequence portion having 17-50 nucleotides or a nucleotide sequence encoding the same, wherein a complex of the second RNA molecule and a CRISPR nuclease affects a second double strand break in a hepatitis B virus sequence.

5. The method of claim 3, wherein the guide sequence portion of the second RNA molecule comprises 17-50 contiguous nucleotides containing nucleotides in the sequence set forth in any one of SEQ ID NOs: 1-18936 and wherein the nucleotide sequence of the guide sequence portion of the second RNA molecule is different than the nucleotide sequence of the guide sequence portion of the first RNA molecule.

6. The method of claim 3, wherein a sequence of nucleotides is excised from a molecule comprising the HBV sequence.

7. The method of claim 5, wherein the sequence of nucleotides excised from the HBV sequence comprises an HBV gene or portion thereof, an HBV coding sequence or portion thereof, an HBV regulatory sequence or portion thereof, and/or a conserved HBV sequence.

8. The method of claim 4, wherein the first or second RNA molecule comprises a guide sequence portion that targets a sequence that is located up to 500 base pairs from an HBV gene, an HBV coding sequence, an HBV regulatory sequence, and/or a conserved HBV sequence that is to be excised by the first and second RNA molecules.

9. The method of claim 1, wherein the cell is a liver cell or a hepatocyte.

10. The method of claim 8, wherein the cell is from a human subject.

11. The method of claim 9, wherein the human subject suffers from chronic or acute hepatitis B.

12. The method of claim 1, wherein the HBV sequence is located on an HBV covalently closed circular DNA (cccDNA) molecule.

13. The method of any one of claims 1, wherein the HBV sequence is located on a genomic DNA molecule that an HBV sequence has integrated into.

14. A composition comprising:
at least one CRISPR nuclease or a nucleotide sequence encoding a CRISPR nuclease; and
a first RNA molecule comprising a guide sequence portion having 17-50 nucleotides in the sequence set forth in any one of SEQ ID NOs: 1-18936 or a nucleotide sequence encoding the same,
wherein a complex of the CRISPR nuclease and the first RNA molecule affects a double strand break in an HBV sequence in a cell.

15. (canceled)

16. The composition of claim 13, further comprising a second RNA molecule comprising a guide sequence portion having 17-50 nucleotides or a nucleotide sequence encoding the same, wherein a complex of the second RNA molecule and a CRISPR nuclease affects a second double strand break in a hepatitis B virus sequence.

17. The composition of claim 14, wherein the guide sequence portion of the second RNA molecule comprises 17-50 contiguous nucleotides containing nucleotides in the sequence set forth in any one of SEQ ID NOs: 1-18936, and wherein the nucleotide sequence of the guide sequence portion of the second RNA molecule is a different nucleotide sequence from the nucleotide sequence of the guide sequence portion of the first RNA molecule.

18. A method for treating hepatitis B, the method comprising delivering to the cell the composition of claim 13.

19. A method for treating, ameliorating the symptoms of, or preventing hepatitis B, the method comprising delivering to a cell of a subject having or at risk of having hepatitis B the composition of claim 13.

20. (canceled)

21. A medicament comprising the composition of claim 13 for use in inactivating a hepatitis B virus in a cell, wherein the medicament is administered by delivering to the cell the composition of claim 13.

22. (canceled)

23. A medicament comprising the composition of claim 14 for use in treating, ameliorating the symptoms of, or preventing hepatitis B, wherein the medicament is administered by delivering to a cell of a subject having or at risk of having hepatitis B the composition of claims 14.

24.-25. (canceled)

The application's sequence listing, which the Patent Office published only in electronic form, follows.

SEQUENCE LISTING (18945 sequences)

SEQ ID NO: 1 - RNA, 20 nt, synthetic construct
  misc_feature 1..20: note = HBV-targeting guide sequence portion
  source 1..20: mol_type = other RNA
aaaaaatgtgaacagtttgt

SEQ ID NO: 2 - RNA, 20 nt, synthetic construct
  misc_feature 1..20: note = HBV-targeting guide sequence portion
  source 1..20: mol_type = other RNA
aaaaacgagagtaactccac

SEQ ID NO: 3 - RNA, 20 nt, synthetic construct
  misc_feature 1..20: note = HBV-targeting guide sequence portion
  source 1..20: mol_type = other RNA
aaaaagtgaaagcctgctta

SEQ ID NO: 4 - RNA, 20 nt, synthetic construct
  misc_feature 1..20: note = HBV-targeting guide sequence portion
  source 1..20: mol_type = other RNA
aaaaagttgcatggtgctgg

SEQ ID NO: 5 - RNA, 20 nt, synthetic construct
  misc_feature 1..20: note = HBV-targeting guide sequence portion
  source 1..20: mol_type = other RNA
aaaaatgtgaacagtttgta

SEQ ID NO: 6 - RNA, 20 nt, synthetic construct
  misc_feature 1..20: note = HBV-targeting guide sequence portion
  source 1..20: mol_type = other RNA
aaaacaaagagatggggtta

SEQ ID NO: 7 - RNA, 20 nt, synthetic construct
  misc_feature 1..20: note = HBV-targeting guide sequence portion
  source 1..20: mol_type = other RNA
aaaacaagcggctaggagtt

SEQ ID NO: 8 - RNA, 20 nt, synthetic construct
  misc_feature 1..20: note = HBV-targeting guide sequence portion
  source 1..20: mol_type = other RNA
aaaacacccgccttccatag

SEQ ID NO: 9 - RNA, 20 nt, synthetic construct
  misc_feature 1..20: note = HBV-targeting guide sequence portion
  source 1..20: mol_type = other RNA
aaaacaccctcttttcctaa

SEQ ID NO: 10 - RNA, 20 nt, synthetic construct
  misc_feature 1..20: note = HBV-targeting guide sequence portion
  source 1..20: mol_type = other RNA
aaaacccagaagacccacaa

SEQ ID NO: 11 - RNA, 20 nt, synthetic construct
  misc_feature 1..20: note = HBV-targeting guide sequence portion
  source 1..20: mol_type = other RNA
aaaaccccgcctgtaacacg

SEQ ID NO: 12 - RNA, 20 nt, synthetic construct
  misc_feature 1..20: note = HBV-targeting guide sequence portion
  source 1..20: mol_type = other RNA
aaaacctagcaggcataatc

SEQ ID NO: 13 - RNA, 20 nt, synthetic construct
  misc_feature 1..20: note = HBV-targeting guide sequence portion
  source 1..20: mol_type = other RNA
aaaaccttcggatggaaact

SEQ ID NO: 14 - RNA, 20 nt, synthetic construct
  misc_feature 1..20: note = HBV-targeting guide sequence portion
  source 1..20: mol_type = other RNA
aaaacgagagtaactccaca

SEQ ID NO: 15 - RNA, 20 nt, synthetic construct
  misc_feature 1..20: note = HBV-targeting guide sequence portion
  source 1..20: mol_type = other RNA
aaaacgccgcagacacatcc

SEQ ID NO: 16 - RNA, 20 nt, synthetic construct
  misc_feature 1..20: note = HBV-targeting guide sequence portion
  source 1..20: mol_type = other RNA
aaaactcccggttaacaggc

SEQ ID NO: 17 - RNA, 20 nt, synthetic construct
  misc_feature 1..20: note = HBV-targeting guide sequence portion
  source 1..20: mol_type = other RNA
aaaagaaaattggtaacagc

SEQ ID NO: 18 - RNA, 20 nt, synthetic construct
  misc_feature 1..20: note = HBV-targeting guide sequence portion
  source 1..20: mol_type = other RNA
aaaagacaccaaatactcta

SEQ ID NO: 19 - RNA, 20 nt, synthetic construct
  misc_feature 1..20: note = HBV-targeting guide sequence portion
  source 1..20: mol_type = other RNA
aaaagacggttgaaattgat

SEQ ID NO: 20 - RNA, 20 nt, synthetic construct
  misc_feature 1..20: note = HBV-targeting guide sequence portion
  source 1..20: mol_type = other RNA
aaaagagggtgttttccaat

SEQ ID NO: 21 - RNA, 20 nt, synthetic construct
  misc_feature 1..20: note = HBV-targeting guide sequence portion
  source 1..20: mol_type = other RNA
aaaaggcctccgtgcggtgg

SEQ ID NO: 22 - RNA, 20 nt, synthetic construct
  misc_feature 1..20: note = HBV-targeting guide sequence portion
  source 1..20: mol_type = other RNA
aaaaggggcagcaaaaccca

SEQ ID NO: 23 - RNA, 20 nt, synthetic construct
  misc_feature 1..20: note = HBV-targeting guide sequence portion
  source 1..20: mol_type = other RNA
aaaagtaagacaagaaatgt

SEQ ID NO: 24 - RNA, 20 nt, synthetic construct
  misc_feature 1..20: note = HBV-targeting guide sequence portion
  source 1..20: mol_type = other RNA
aaaagtgaaagcctgcttag

SEQ ID NO: 25 - RNA, 20 nt, synthetic construct
  misc_feature 1..20: note = HBV-targeting guide sequence portion
  source 1..20: mol_type = other RNA
aaaagttgcatggtgctggt

SEQ ID NO: 26 - RNA, 20 nt, synthetic construct
  misc_feature 1..20: note = HBV-targeting guide sequence portion
  source 1..20: mol_type = other RNA
aaaatcaaagaatgtttcag

SEQ ID NO: 27 - RNA, 20 nt, synthetic construct
  misc_feature 1..20: note = HBV-targeting guide sequence portion
  source 1..20: mol_type = other RNA
aaaatcacatcatacacaaa

SEQ ID NO: 28 - RNA, 20 nt, synthetic construct
  misc_feature 1..20: note = HBV-targeting guide sequence portion
  source 1..20: mol_type = other RNA
aaaatgtgaacagtttgtag

SEQ ID NO: 29 - RNA, 20 nt, synthetic construct
  misc_feature 1..20: note = HBV-targeting guide sequence portion
  source 1..20: mol_type = other RNA
aaaattcctatgggagtggg

SEQ ID NO: 30 - RNA, 20 nt, synthetic construct
  misc_feature 1..20: note = HBV-targeting guide sequence portion
  source 1..20: mol_type = other RNA
aaaattcgcagtccccaacc

SEQ ID NO: 31 - RNA, 20 nt, synthetic construct
  misc_feature 1..20: note = HBV-targeting guide sequence portion
  source 1..20: mol_type = other RNA
aaaattgagagaagtccacc

SEQ ID NO: 32 - RNA, 20 nt, synthetic construct
  misc_feature 1..20: note = HBV-targeting guide sequence portion
  source 1..20: mol_type = other RNA
aaaattggtaacagcggtat

SEQ ID NO: 33 - RNA, 20 nt, synthetic construct
  misc_feature 1..20: note = HBV-targeting guide sequence portion
  source 1..20: mol_type = other RNA
aaaatttcccaccttatgag

SEQ ID NO: 34 - RNA, 20 nt, synthetic construct
  misc_feature 1..20: note = HBV-targeting guide sequence portion
  source 1..20: mol_type = other RNA
aaacaaacagtctttgaagt

SEQ ID NO: 35 - RNA, 20 nt, synthetic construct
  misc_feature 1..20: note = HBV-targeting guide sequence portion
  source 1..20: mol_type = other RNA
aaacaaagagatggggttat

SEQ ID NO: 36 - RNA, 20 nt, synthetic construct
  misc_feature 1..20: note = HBV-targeting guide sequence portion
  source 1..20: mol_type = other RNA
aaacaaaggacgtcccgcgc

SEQ ID NO: 37 - RNA, 20 nt, synthetic construct
  misc_feature 1..20: note = HBV-targeting guide sequence portion
  source 1..20: mol_type = other RNA
aaacaagcggctaggagttc

SEQ ID NO: 38 - RNA, 20 nt, synthetic construct
  misc_feature 1..20: note = HBV-targeting guide sequence portion
  source 1..20: mol_type = other RNA
aaacaatacctgaaccttta

SEQ ID NO: 39 - RNA, 20 nt, synthetic construct
  misc_feature 1..20: note = HBV-targeting guide sequence portion
  source 1..20: mol_type = other RNA
aaacacccgccttccataga

SEQ ID NO: 40 - RNA, 20 nt, synthetic construct
  misc_feature 1..20: note = HBV-targeting guide sequence portion
  source 1..20: mol_type = other RNA
aaacaccctcttttcctaat

SEQ ID NO: 41 - RNA, 20 nt, synthetic construct
  misc_feature 1..20: note = HBV-targeting guide sequence portion
  source 1..20: mol_type = other RNA
aaacactcatcctcaggcca

SEQ ID NO: 42 - RNA, 20 nt, synthetic construct
  misc_feature 1..20: note = HBV-targeting guide sequence portion
  source 1..20: mol_type = other RNA
aaacacttggcacagacctg

SEQ ID NO: 43 - RNA, 20 nt, synthetic construct
  misc_feature 1..20: note = HBV-targeting guide sequence portion
  source 1..20: mol_type = other RNA
aaacagtctttgaagtatgc

SEQ ID NO: 44 - RNA, 20 nt, synthetic construct
  misc_feature 1..20: note = HBV-targeting guide sequence portion
  source 1..20: mol_type = other RNA
aaacagtgggggaaagccct

SEQ ID NO: 45 - RNA, 20 nt, synthetic construct
  misc_feature 1..20: note = HBV-targeting guide sequence portion
  source 1..20: mol_type = other RNA
aaacataccttgatagtcca

SEQ ID NO: 46 - RNA, 20 nt, synthetic construct
  misc_feature 1..20: note = HBV-targeting guide sequence portion
  source 1..20: mol_type = other RNA
aaacattctcgggactgaca

SEQ ID NO: 47 - RNA, 20 nt, synthetic construct
  misc_feature 1..20: note = HBV-targeting guide sequence portion
  source 1..20: mol_type = other RNA
aaacattctttgattttgtg

SEQ ID NO: 48 - RNA, 20 nt, synthetic construct
  misc_feature 1..20: note = HBV-targeting guide sequence portion
  source 1..20: mol_type = other RNA
aaaccacaatagttgtctga

SEQ ID NO: 49 - RNA, 20 nt, synthetic construct
  misc_feature 1..20: note = HBV-targeting guide sequence portion
  source 1..20: mol_type = other RNA
aaacccagaagacccacaat

SEQ ID NO: 50 - RNA, 20 nt, synthetic construct
  misc_feature 1..20: note = HBV-targeting guide sequence portion
  source 1..20: mol_type = other RNA
aaaccccgcctgtaacacga

SEQ ID NO: 51 - RNA, 20 nt, synthetic construct
  misc_feature 1..20: note = HBV-targeting guide sequence portion
  source 1..20: mol_type = other RNA
aaaccctaacaaaacaaaga

SEQ ID NO: 52 - RNA, 20 nt, synthetic construct
  misc_feature 1..20: note = HBV-targeting guide sequence portion
  source 1..20: mol_type = other RNA
aaaccctgttccgactactg

SEQ ID NO: 53 - RNA, 20 nt, synthetic construct
  misc_feature 1..20: note = HBV-targeting guide sequence portion
  source 1..20: mol_type = other RNA
aaacctagcaggcataatca

SEQ ID NO: 54 - RNA, 20 nt, synthetic construct
  misc_feature 1..20: note = HBV-targeting guide sequence portion
  source 1..20: mol_type = other RNA
aaaccttattatccagaaca

SEQ ID NO: 55 - RNA, 20 nt, synthetic construct
  misc_feature 1..20: note = HBV-targeting guide sequence portion
  source 1..20: mol_type = other RNA
aaaccttcggatggaaactg

SEQ ID NO: 56 - RNA, 20 nt, synthetic construct
  misc_feature 1..20: note = HBV-targeting guide sequence portion
  source 1..20: mol_type = other RNA
aaaccttgccagcaaatccg

SEQ ID NO: 57 - RNA, 20 nt, synthetic construct
  misc_feature 1..20: note = HBV-targeting guide sequence portion
  source 1..20: mol_type = other RNA
aaacgagagtaactccacag

SEQ ID NO: 58 - RNA, 20 nt, synthetic construct
  misc_feature 1..20: note = HBV-targeting guide sequence portion
  source 1..20: mol_type = other RNA
aaacgccgcagacacatcca

SEQ ID NO: 59 - RNA, 20 nt, synthetic construct
  misc_feature 1..20: note = HBV-targeting guide sequence portion
  source 1..20: mol_type = other RNA
aaacgggctgaggcccactc

SEQ ID NO: 60 - RNA, 20 nt, synthetic construct
  misc_feature 1..20: note = HBV-targeting guide sequence portion
  source 1..20: mol_type = other RNA
aaacggtcctagagtatttg

SEQ ID NO: 61 - RNA, 20 nt, synthetic construct
  misc_feature 1..20: note = HBV-targeting guide sequence portion
  source 1..20: mol_type = other RNA
aaactagacactatttacac

SEQ ID NO: 62 - RNA, 20 nt, synthetic construct
  misc_feature 1..20: note = HBV-targeting guide sequence portion
  source 1..20: mol_type = other RNA
aaactccaacaatccagatt

SEQ ID NO: 63 - RNA, 20 nt, synthetic construct
  misc_feature 1..20: note = HBV-targeting guide sequence portion
  source 1..20: mol_type = other RNA
aaactcccggttaacaggcc

SEQ ID NO: 64 - RNA, 20 nt, synthetic construct
  misc_feature 1..20: note = HBV-targeting guide sequence portion
  source 1..20: mol_type = other RNA
aaactctgcaagatcccaga

SEQ ID NO: 65 - RNA, 20 nt, synthetic construct
  misc_feature 1..20: note = HBV-targeting guide sequence portion
  source 1..20: mol_type = other RNA
aaactgagccaagagaaacg

SEQ ID NO: 66 - RNA, 20 nt, synthetic construct
  misc_feature 1..20: note = HBV-targeting guide sequence portion
  source 1..20: mol_type = other RNA
aaactgcacctgtattccca

SEQ ID NO: 67 - RNA, 20 nt, synthetic construct
  misc_feature 1..20: note = HBV-targeting guide sequence portion
  source 1..20: mol_type = other RNA
aaactgttcacattttttga

SEQ ID NO: 68 - RNA, 20 nt, synthetic construct
  misc_feature 1..20: note = HBV-targeting guide sequence portion
  source 1..20: mol_type = other RNA
aaagaaaattggtaacagcg

SEQ ID NO: 69 - RNA, 20 nt, synthetic construct
  misc_feature 1..20: note = HBV-targeting guide sequence portion
  source 1..20: mol_type = other RNA
aaagaagtcagaaggcaaaa

SEQ ID NO: 70 - RNA, 20 nt, synthetic construct
  misc_feature 1..20: note = HBV-targeting guide sequence portion
  source 1..20: mol_type = other RNA
aaagaatcccagaggattgc

SEQ ID NO: 71 - RNA, 20 nt, synthetic construct
  misc_feature 1..20: note = HBV-targeting guide sequence portion
  source 1..20: mol_type = other RNA
aaagaatgtttcagaaaact

SEQ ID NO: 72 - RNA, 20 nt, synthetic construct
  misc_feature 1..20: note = HBV-targeting guide sequence portion
  source 1..20: mol_type = other RNA
aaagaattgcttgcctgagt

SEQ ID NO: 73 - RNA, 20 nt, synthetic construct
  misc_feature 1..20: note = HBV-targeting guide sequence portion
  source 1..20: mol_type = other RNA
aaagaatttggagctactgt

SEQ ID NO: 74 - RNA, 20 nt, synthetic construct
  misc_feature 1..20: note = HBV-targeting guide sequence portion
  source 1..20: mol_type = other RNA
aaagacaaaagaaaattggt

SEQ ID NO: 75 - RNA, 20 nt, synthetic construct
  misc_feature 1..20: note = HBV-targeting guide sequence portion
  source 1..20: mol_type = other RNA
aaagacaccaaatactctag

SEQ ID NO: 76 - RNA, 20 nt, synthetic construct
  misc_feature 1..20: note = HBV-targeting guide sequence portion
  source 1..20: mol_type = other RNA
aaagacaggtacagtagaag

SEQ ID NO: 77 - RNA, 20 nt, synthetic construct
  misc_feature 1..20: note = HBV-targeting guide sequence portion
  source 1..20: mol_type = other RNA
aaagacggttgaaattgatt

SEQ ID NO: 78 - RNA, 20 nt, synthetic construct
  misc_feature 1..20: note = HBV-targeting guide sequence portion
  source 1..20: mol_type = other RNA
aaagactgggaggagttggg

SEQ ID NO: 79 - RNA, 20 nt, synthetic construct
  misc_feature 1..20: note = HBV-targeting guide sequence portion
  source 1..20: mol_type = other RNA
aaagactgtttgtttaaaga

SEQ ID NO: 80 - RNA, 20 nt, synthetic construct
  misc_feature 1..20: note = HBV-targeting guide sequence portion
  source 1..20: mol_type = other RNA
aaagagaggtgcgccccgtg

SEQ ID NO: 81 - RNA, 20 nt, synthetic construct
  misc_feature 1..20: note = HBV-targeting guide sequence portion
  source 1..20: mol_type = other RNA
aaagagatggggttattctc

SEQ ID NO: 82 - RNA, 20 nt, synthetic construct
  misc_feature 1..20: note = HBV-targeting guide sequence portion
  source 1..20: mol_type = other RNA
aaagagggtgttttccaatg

SEQ ID NO: 83 - RNA, 20 nt, synthetic construct
  misc_feature 1..20: note = HBV-targeting guide sequence portion
  source 1..20: mol_type = other RNA
aaagatcattaatctaatct

SEQ ID NO: 84 - RNA, 20 nt, synthetic construct
  misc_feature 1..20: note = HBV-targeting guide sequence portion
  source 1..20: mol_type = other RNA
aaagattctgccccatgctg

SEQ ID NO: 85 - RNA, 20 nt, synthetic construct
  misc_feature 1..20: note = HBV-targeting guide sequence portion
  source 1..20: mol_type = other RNA
aaagcaggataaccacattg

SEQ ID NO: 86 - RNA, 20 nt, synthetic construct
  misc_feature 1..20: note = HBV-targeting guide sequence portion
  source 1..20: mol_type = other RNA
aaagccaaacagtgggggaa

SEQ ID NO: 87 - RNA, 20 nt, synthetic construct
  misc_feature 1..20: note = HBV-targeting guide sequence portion
  source 1..20: mol_type = other RNA
aaagccacccaaggcacagc

SEQ ID NO: 88 - RNA, 20 nt, synthetic construct
  misc_feature 1..20: note = HBV-targeting guide sequence portion
  source 1..20: mol_type = other RNA
aaagcccaggatgatgggat

SEQ ID NO: 89 - RNA, 20 nt, synthetic construct
  misc_feature 1..20: note = HBV-targeting guide sequence portion
  source 1..20: mol_type = other RNA
aaagccccgtaaaatttccc

SEQ ID NO: 90 - RNA, 20 nt, synthetic construct
  misc_feature 1..20: note = HBV-targeting guide sequence portion
  source 1..20: mol_type = other RNA
aaagccctacgaaccactga

SEQ ID NO: 91 - RNA, 20 nt, synthetic construct
  misc_feature 1..20: note = HBV-targeting guide sequence portion
  source 1..20: mol_type = other RNA
aaagcctgcttagattgaat

SEQ ID NO: 92 - RNA, 20 nt, synthetic construct
  misc_feature 1..20: note = HBV-targeting guide sequence portion
  source 1..20: mol_type = other RNA
aaaggacgtcccgcgcagga

SEQ ID NO: 93 - RNA, 20 nt, synthetic construct
  misc_feature 1..20: note = HBV-targeting guide sequence portion
  source 1..20: mol_type = other RNA
aaaggcctccgtgcggtggg

SEQ ID NO: 94 - RNA, 20 nt, synthetic construct
  misc_feature 1..20: note = HBV-targeting guide sequence portion
  source 1..20: mol_type = other RNA
aaaggccttgtaagttggcg

SEQ ID NO: 95 - RNA, 20 nt, synthetic construct
  misc_feature 1..20: note = HBV-targeting guide sequence portion
  source 1..20: mol_type = other RNA
aaagggactcaagatgctgt

SEQ ID NO: 96 - RNA, 20 nt, synthetic construct
  misc_feature 1..20: note = HBV-targeting guide sequence portion
  source 1..20: mol_type = other RNA
aaaggggcagcaaaacccag

SEQ ID NO: 97 - RNA, 20 nt, synthetic construct
  misc_feature 1..20: note = HBV-targeting guide sequence portion
  source 1..20: mol_type = other RNA
aaaggttcaggtattgttta

SEQ ID NO: 98 - RNA, 20 nt, synthetic construct
  misc_feature 1..20: note = HBV-targeting guide sequence portion
  source 1..20: mol_type = other RNA
aaaggttccacgcatgcgct

SEQ ID NO: 99 - RNA, 20 nt, synthetic construct
  misc_feature 1..20: note = HBV-targeting guide sequence portion
  source 1..20: mol_type = other RNA
aaagtaagacaagaaatgtg

SEQ ID NO: 100 - RNA, 20 nt, synthetic construct
  misc_feature 1..20: note = HBV-targeting guide sequence portion
  source 1..20: mol_type = other RNA
aaagtgaaagcctgcttaga

SEQ ID NO: 101 - RNA, 20 nt, synthetic construct
  misc_feature 1..20: note = HBV-targeting guide sequence portion
  source 1..20: mol_type = other RNA
aaagtgtgtcaacgaattgt

SEQ ID NO: 102 - RNA, 20 nt, synthetic construct
  misc_feature 1..20: note = HBV-targeting guide sequence portion
  source 1..20: mol_type = other RNA
aaagttcagacaactattgt

SEQ ID NO: 103 - RNA, 20 nt, synthetic construct
  misc_feature 1..20: note = HBV-targeting guide sequence portion
  source 1..20: mol_type = other RNA
aaagttgcatggtgctggtg

SEQ ID NO: 104 - RNA, 20 nt, synthetic construct
  misc_feature 1..20: note = HBV-targeting guide sequence portion
  source 1..20: mol_type = other RNA
aaatactctaggaccgtttc

SEQ ID NO: 105 - RNA, 20 nt, synthetic construct
  misc_feature 1..20: note = HBV-targeting guide sequence portion
  source 1..20: mol_type = other RNA
aaatacttgcccttggataa

SEQ ID NO: 106 - RNA, 20 nt, synthetic construct
  misc_feature 1..20: note = HBV-targeting guide sequence portion
  source 1..20: mol_type = other RNA
aaatagtgtctagtttggaa

SEQ ID NO: 107 - RNA, 20 nt, synthetic construct
  misc_feature 1..20: note = HBV-targeting guide sequence portion
  source 1..20: mol_type = other RNA
aaatatacatcgttcccatg

SEQ ID NO: 108 - RNA, 20 nt, synthetic construct
  misc_feature 1..20: note = HBV-targeting guide sequence portion
  source 1..20: mol_type = other RNA
aaatcaaagaatgtttcaga

SEQ ID NO: 109 - RNA, 20 nt, synthetic construct
  misc_feature 1..20: note = HBV-targeting guide sequence portion
  source 1..20: mol_type = other RNA
aaatcacatcatacacaaaa

SEQ ID NO: 110 - RNA, 20 nt, synthetic construct
  misc_feature 1..20: note = HBV-targeting guide sequence portion
  source 1..20: mol_type = other RNA
aaatccgcctcctgcctcta

SEQ ID NO: 111 - RNA, 20 nt, synthetic construct
  misc_feature 1..20: note = HBV-targeting guide sequence portion
  source 1..20: mol_type = other RNA
aaatgcccctatcctatcaa

SEQ ID NO: 112 - RNA, 20 nt, synthetic construct
  misc_feature 1..20: note = HBV-targeting guide sequence portion
  source 1..20: mol_type = other RNA
aaatggcactagtaaactga

SEQ ID NO: 113 - RNA, 20 nt, synthetic construct
  misc_feature 1..20: note = HBV-targeting guide sequence portion
  source 1..20: mol_type = other RNA
aaatgtacacccaaagacaa

SEQ ID NO: 114 - RNA, 20 nt, synthetic construct
  misc_feature 1..20: note = HBV-targeting guide sequence portion
  source 1..20: mol_type = other RNA
aaatgtgaaaccacaatagt

SEQ ID NO: 115 - RNA, 20 nt, synthetic construct
  misc_feature 1..20: note = HBV-targeting guide sequence portion
  source 1..20: mol_type = other RNA
aaatgtgaacagtttgtagg

SEQ ID NO: 116 - RNA, 20 nt, synthetic construct
  misc_feature 1..20: note = HBV-targeting guide sequence portion
  source 1..20: mol_type = other RNA
aaattaagagaataacccca

SEQ ID NO: 117 - RNA, 20 nt, synthetic construct
  misc_feature 1..20: note = HBV-targeting guide sequence portion
  source 1..20: mol_type = other RNA
aaattagtacccacccaggt

SEQ ID NO: 118 - RNA, 20 nt, synthetic construct
  misc_feature 1..20: note = HBV-targeting guide sequence portion
  source 1..20: mol_type = other RNA
aaattcaccaaatacttgcc

SEQ ID NO: 119 - RNA, 20 nt, synthetic construct
  misc_feature 1..20: note = HBV-targeting guide sequence portion
  source 1..20: mol_type = other RNA
aaattcctatgggagtgggc

SEQ ID NO: 120 - RNA, 20 nt, synthetic construct
  misc_feature 1..20: note = HBV-targeting guide sequence portion
  source 1..20: mol_type = other RNA
aaattcgcagtccccaacct

SEQ ID NO: 121 - RNA, 20 nt, synthetic construct
  misc_feature 1..20: note = HBV-targeting guide sequence portion
  source 1..20: mol_type = other RNA
aaattctttatatgggtcaa

SEQ ID NO: 122 - RNA, 20 nt, synthetic construct
  misc_feature 1..20: note = HBV-targeting guide sequence portion
  source 1..20: mol_type = other RNA
aaattgagagaagtccacca

SEQ ID NO: 123 - RNA, 20 nt, synthetic construct
  misc_feature 1..20: note = HBV-targeting guide sequence portion
  source 1..20: mol_type = other RNA
aaattgattatgcctgctag

SEQ ID NO: 124 - RNA, 20 nt, synthetic construct
  misc_feature 1..20: note = HBV-targeting guide sequence portion
  source 1..20: mol_type = other RNA
aaattggtaacagcggtata

SEQ ID NO: 125 - RNA, 20 nt, synthetic construct
  misc_feature 1..20: note = HBV-targeting guide sequence portion
  source 1..20: mol_type = other RNA
aaattggtctgcgcaccagc

SEQ ID NO: 126 - RNA, 20 nt, synthetic construct
  misc_feature 1..20: note = HBV-targeting guide sequence portion
  source 1..20: mol_type = other RNA
aaatttcccaccttatgagt

SEQ ID NO: 127 - RNA, 20 nt, synthetic construct
  misc_feature 1..20: note = HBV-targeting guide sequence portion
  source 1..20: mol_type = other RNA
aaattttacggggctttatt

SEQ ID NO: 128 - RNA, 20 nt, synthetic construct
  misc_feature 1..20: note = HBV-targeting guide sequence portion
  source 1..20: mol_type = other RNA
aacaaaacaaagagatgggg

SEQ ID NO: 129 - RNA, 20 nt, synthetic construct
  misc_feature 1..20: note = HBV-targeting guide sequence portion
  source 1..20: mol_type = other RNA
aacaaacagtctttgaagta

SEQ ID NO: 130 - RNA, 20 nt, synthetic construct
  misc_feature 1..20: note = HBV-targeting guide sequence portion
  source 1..20: mol_type = other RNA
aacaaagagatggggttatt

SEQ ID NO: 131 - RNA, 20 nt, synthetic construct
  misc_feature 1..20: note = HBV-targeting guide sequence portion
  source 1..20: mol_type = other RNA
aacaaaggacgtcccgcgca

SEQ ID NO: 132 - RNA, 20 nt, synthetic construct
  misc_feature 1..20: note = HBV-targeting guide sequence portion
  source 1..20: mol_type = other RNA
aacaaatggcactagtaaac

SEQ ID NO: 133 - RNA, 20 nt, synthetic construct
  misc_feature 1..20: note = HBV-targeting guide sequence portion
  source 1..20: mol_type = other RNA
aacaacacaagtctccggaa

SEQ ID NO: 134 - RNA, 20 nt, synthetic construct
  misc_feature 1..20: note = HBV-targeting guide sequence portion
  source 1..20: mol_type = other RNA
aacaagaagatgaggcatag

SEQ ID NO: 135 - RNA, 20 nt, synthetic construct
  misc_feature 1..20: note = HBV-targeting guide sequence portion
  source 1..20: mol_type = other RNA
aacaagagatgattaggcag

SEQ ID NO: 136 - RNA, 20 nt, synthetic construct
  misc_feature 1..20: note = HBV-targeting guide sequence portion
  source 1..20: mol_type = other RNA
aacaagagctacagcatggg

SEQ ID NO: 137 - RNA, 20 nt, synthetic construct
  misc_feature 1..20: note = HBV-targeting guide sequence portion
  source 1..20: mol_type = other RNA
aacaagcggctaggagttcc

SEQ ID NO: 138 - RNA, 20 nt, synthetic construct
  misc_feature 1..20: note = HBV-targeting guide sequence portion
  source 1..20: mol_type = other RNA
aacaaggaaaaccccgcctg

SEQ ID NO: 139 - RNA, 20 nt, synthetic construct
  misc_feature 1..20: note = HBV-targeting guide sequence portion
  source 1..20: mol_type = other RNA
aacaaggatccctggccaga

SEQ ID NO: 140 - RNA, 20 nt, synthetic construct
  misc_feature 1..20: note = HBV-targeting guide sequence portion
  source 1..20: mol_type = other RNA
aacaaggtaggagctggagc

SEQ ID NO: 141 - RNA, 20 nt, synthetic construct
  misc_feature 1..20: note = HBV-targeting guide sequence portion
  source 1..20: mol_type = other RNA
aacaatacctgaacctttac

SEQ ID NO: 142 - RNA, 20 nt, synthetic construct
  misc_feature 1..20: note = HBV-targeting guide sequence portion
  source 1..20: mol_type = other RNA
aacaatcaatgacatagccc

SEQ ID NO: 143 - RNA, 20 nt, synthetic construct
  misc_feature 1..20: note = HBV-targeting guide sequence portion
  source 1..20: mol_type = other RNA
aacaatccagattgggactt

SEQ ID NO: 144 - RNA, 20 nt, synthetic construct
  misc_feature 1..20: note = HBV-targeting guide sequence portion
  source 1..20: mol_type = other RNA
aacaatgctcaggagactcc

SEQ ID NO: 145 - RNA, 20 nt, synthetic construct
  misc_feature 1..20: note = HBV-targeting guide sequence portion
  source 1..20: mol_type = other RNA
aacacaagtctccggaagtg

SEQ ID NO: 146 - RNA, 20 nt, synthetic construct
  misc_feature 1..20: note = HBV-targeting guide sequence portion
  source 1..20: mol_type = other RNA
aacacatagcgcctcattct

SEQ ID NO: 147 - RNA, 20 nt, synthetic construct
  misc_feature 1..20: note = HBV-targeting guide sequence portion
  source 1..20: mol_type = other RNA
aacacccgccttccatagag

SEQ ID NO: 148 - RNA, 20 nt, synthetic construct
  misc_feature 1..20: note = HBV-targeting guide sequence portion
  source 1..20: mol_type = other RNA
aacaccctcttttcctaata

SEQ ID NO: 149 - RNA, 20 nt, synthetic construct
  misc_feature 1..20: note = HBV-targeting guide sequence portion
  source 1..20: mol_type = other RNA
aacacgagcaggggtcctag

SEQ ID NO: 150 - RNA, 20 nt, synthetic construct
  misc_feature 1..20: note = HBV-targeting guide sequence portion
  source 1..20: mol_type = other RNA
aacactcatatgggcctaaa

SEQ ID NO: 151 - RNA, 20 nt, synthetic construct
  misc_feature 1..20: note = HBV-targeting guide sequence portion
  source 1..20: mol_type = other RNA
aacactcatcctcaggccat

SEQ ID NO: 152 - RNA, 20 nt, synthetic construct
  misc_feature 1..20: note = HBV-targeting guide sequence portion
  source 1..20: mol_type = other RNA
aacacttccggagacttgtg

SEQ ID NO: 153 - RNA, 20 nt, synthetic construct
  misc_feature 1..20: note = HBV-targeting guide sequence portion
  source 1..20: mol_type = other RNA
aacacttggcacagacctgg

SEQ ID NO: 154 - RNA, 20 nt, synthetic construct
  misc_feature 1..20: note = HBV-targeting guide sequence portion
  source 1..20: mol_type = other RNA
aacagagttgtcagtcccga

SEQ ID NO: 155 - RNA, 20 nt, synthetic construct
  misc_feature 1..20: note = HBV-targeting guide sequence portion
  source 1..20: mol_type = other RNA
aacagcggtataaagggact

SEQ ID NO: 156 - RNA, 20 nt, synthetic construct
  misc_feature 1..20: note = HBV-targeting guide sequence portion
  source 1..20: mol_type = other RNA
aacaggagggatacatagag

SEQ ID NO: 157 - RNA, 20 nt, synthetic construct
  misc_feature 1..20: note = HBV-targeting guide sequence portion
  source 1..20: mol_type = other RNA
aacaggcctattgattggaa

SEQ ID NO: 158 - RNA, 20 nt, synthetic construct
  misc_feature 1..20: note = HBV-targeting guide sequence portion
  source 1..20: mol_type = other RNA
aacagggtttactgttcctg

SEQ ID NO: 159 - RNA, 20 nt, synthetic construct
  misc_feature 1..20: note = HBV-targeting guide sequence portion
  source 1..20: mol_type = other RNA
aacagtaaaccctgttccga

SEQ ID NO: 160 - RNA, 20 nt, synthetic construct
  misc_feature 1..20: note = HBV-targeting guide sequence portion
  source 1..20: mol_type = other RNA
aacagtaggacatgaacaag

SEQ ID NO: 161 - RNA, 20 nt, synthetic construct
  misc_feature 1..20: note = HBV-targeting guide sequence portion
  source 1..20: mol_type = other RNA
aacagtctttgaagtatgcc

SEQ ID NO: 162 - RNA, 20 nt, synthetic construct
  misc_feature 1..20: note = HBV-targeting guide sequence portion
  source 1..20: mol_type = other RNA
aacagtgggggaaagcccta

SEQ ID NO: 163 - RNA, 20 nt, synthetic construct
  misc_feature 1..20: note = HBV-targeting guide sequence portion
  source 1..20: mol_type = other RNA
aacagtttgtaggcccgctt

SEQ ID NO: 164 - RNA, 20 nt, synthetic construct
  misc_feature 1..20: note = HBV-targeting guide sequence portion
  source 1..20: mol_type = other RNA
aacataccttgatagtccag

SEQ ID NO: 165 - RNA, 20 nt, synthetic construct
  misc_feature 1..20: note = HBV-targeting guide sequence portion
  source 1..20: mol_type = other RNA
aacatcacatcaggattcct

SEQ ID NO: 166 - RNA, 20 nt, synthetic construct
  misc_feature 1..20: note = HBV-targeting guide sequence portion
  source 1..20: mol_type = other RNA
aacatctagttaatcattac

SEQ ID NO: 167 - RNA, 20 nt, synthetic construct
  misc_feature 1..20: note = HBV-targeting guide sequence portion
  source 1..20: mol_type = other RNA
aacatggagaacatcacatc

SEQ ID NO: 168 - RNA, 20 nt, synthetic construct
  misc_feature 1..20: note = HBV-targeting guide sequence portion
  source 1..20: mol_type = other RNA
aacattctcgggactgacaa

SEQ ID NO: 169 - RNA, 20 nt, synthetic construct
  misc_feature 1..20: note = HBV-targeting guide sequence portion
  source 1..20: mol_type = other RNA
aacattctttgattttgtgt

SEQ ID NO: 170 - RNA, 20 nt, synthetic construct
  misc_feature 1..20: note = HBV-targeting guide sequence portion
  source 1..20: mol_type = other RNA
aacattgagatccccgagat

SEQ ID NO: 171 - RNA, 20 nt, synthetic construct
  misc_feature 1..20: note = HBV-targeting guide sequence portion
  source 1..20: mol_type = other RNA
aaccaacaagaagatgaggc

SEQ ID NO: 172 - RNA, 20 nt, synthetic construct
  misc_feature 1..20: note = HBV-targeting guide sequence portion
  source 1..20: mol_type = other RNA
aaccacaatagttgtctgaa

SEQ ID NO: 173 - RNA, 20 nt, synthetic construct
  misc_feature 1..20: note = HBV-targeting guide sequence portion
  source 1..20: mol_type = other RNA
aaccacattgtgtaaaaggg

SEQ ID NO: 174 - RNA, 20 nt, synthetic construct
  misc_feature 1..20: note = HBV-targeting guide sequence portion
  source 1..20: mol_type = other RNA
aaccaccagcacgggaccct

SEQ ID NO: 175 - RNA, 20 nt, synthetic construct
  misc_feature 1..20: note = HBV-targeting guide sequence portion
  source 1..20: mol_type = other RNA
aaccactgaacaaatggcac

SEQ ID NO: 176 - RNA, 20 nt, synthetic construct
  misc_feature 1..20: note = HBV-targeting guide sequence portion
  source 1..20: mol_type = other RNA
aaccaggacaagttggagga

SEQ ID NO: 177 - RNA, 20 nt, synthetic construct
  misc_feature 1..20: note = HBV-targeting guide sequence portion
  source 1..20: mol_type = other RNA
aaccagtgggggttgcatca

SEQ ID NO: 178 - RNA, 20 nt, synthetic construct
  misc_feature 1..20: note = HBV-targeting guide sequence portion
  source 1..20: mol_type = other RNA
aacccagaagacccacaatt

SEQ ID NO: 179 - RNA, 20 nt, synthetic construct
  misc_feature 1..20: note = HBV-targeting guide sequence portion
  source 1..20: mol_type = other RNA
aaccccatctctttgttttg

SEQ ID NO: 180 - RNA, 20 nt, synthetic construct
  misc_feature 1..20: note = HBV-targeting guide sequence portion
  source 1..20: mol_type = other RNA
aacccccactggttggggct

SEQ ID NO: 181 - RNA, 20 nt, synthetic construct
  misc_feature 1..20: note = HBV-targeting guide sequence portion
  source 1..20: mol_type = other RNA
aaccccgcctgtaacacgag

SEQ ID NO: 182 - RNA, 20 nt, synthetic construct
  misc_feature 1..20: note = HBV-targeting guide sequence portion
  source 1..20: mol_type = other RNA
aaccctaacaaaacaaagag

SEQ ID NO: 183 - RNA, 20 nt, synthetic construct
  misc_feature 1..20: note = HBV-targeting guide sequence portion
  source 1..20: mol_type = other RNA
aaccctagcccgaatgctcc

SEQ ID NO: 184 - RNA, 20 nt, synthetic construct
  misc_feature 1..20: note = HBV-targeting guide sequence portion
  source 1..20: mol_type = other RNA
aaccctcattggaaaacacc

SEQ ID NO: 185 - RNA, 20 nt, synthetic construct
  misc_feature 1..20: note = HBV-targeting guide sequence portion
  source 1..20: mol_type = other RNA
aaccctgttccgactactgc

SEQ ID NO: 186 - RNA, 20 nt, synthetic construct
  misc_feature 1..20: note = HBV-targeting guide sequence portion
  source 1..20: mol_type = other RNA
aaccgggagttttctgaaac

SEQ ID NO: 187 - RNA, 20 nt, synthetic construct
  misc_feature 1..20: note = HBV-targeting guide sequence portion
  source 1..20: mol_type = other RNA
aaccgtcttttctcattaac

SEQ ID NO: 188 - RNA, 20 nt, synthetic construct
  misc_feature 1..20: note = HBV-targeting guide sequence portion
  source 1..20: mol_type = other RNA
aacctagcaggcataatcaa

SEQ ID NO: 189 - RNA, 20 nt, synthetic construct
  misc_feature 1..20: note = HBV-targeting guide sequence portion
  source 1..20: mol_type = other RNA
aacctccaatcactcaccaa

SEQ ID NO: 190 - RNA, 20 nt, synthetic construct
  misc_feature 1..20: note = HBV-targeting guide sequence portion
  source 1..20: mol_type = other RNA
aacctcctgtcctccaactt

SEQ ID NO: 191 - RNA, 20 nt, synthetic construct
  misc_feature 1..20: note = HBV-targeting guide sequence portion
  source 1..20: mol_type = other RNA
aacctctatgtatccctcct

SEQ ID NO: 192 - RNA, 20 nt, synthetic construct
  misc_feature 1..20: note = HBV-targeting guide sequence portion
  source 1..20: mol_type = other RNA
aacctgcacgactcctgctc

SEQ ID NO: 193 - RNA, 20 nt, synthetic construct
  misc_feature 1..20: note = HBV-targeting guide sequence portion
  source 1..20: mol_type = other RNA
aaccttattatccagaacat

SEQ ID NO: 194 - RNA, 20 nt, synthetic construct
  misc_feature 1..20: note = HBV-targeting guide sequence portion
  source 1..20: mol_type = other RNA
aaccttccaccaaactctgc

SEQ ID NO: 195 - RNA, 20 nt, synthetic construct
  misc_feature 1..20: note = HBV-targeting guide sequence portion
  source 1..20: mol_type = other RNA
aaccttcggatggaaactgc

SEQ ID NO: 196 - RNA, 20 nt, synthetic construct
  misc_feature 1..20: note = HBV-targeting guide sequence portion
  source 1..20: mol_type = other RNA
aaccttgccagcaaatccgc

SEQ ID NO: 197 - RNA, 20 nt, synthetic construct
  misc_feature 1..20: note = HBV-targeting guide sequence portion
  source 1..20: mol_type = other RNA
aacctttaccccgttgccag

SEQ ID NO: 198 - RNA, 20 nt, synthetic construct
  misc_feature 1..20: note = HBV-targeting guide sequence portion
  source 1..20: mol_type = other RNA
aacctttccggctcctctgc

SEQ ID NO: 199 - RNA, 20 nt, synthetic construct
  misc_feature 1..20: note = HBV-targeting guide sequence portion
  source 1..20: mol_type = other RNA
aacgaattgtgggtcttctg

SEQ ID NO: 200 - RNA, 20 nt, synthetic construct
  misc_feature 1..20: note = HBV-targeting guide sequence portion
  source 1..20: mol_type = other RNA
aacgaccgaccttgaggcat

SEQ ID NO: 201 - RNA, 20 nt, synthetic construct
  misc_feature 1..20: note = HBV-targeting guide sequence portion
  source 1..20: mol_type = other RNA
aacgagagtaactccacagt

SEQ ID NO: 202 - RNA, 20 nt, synthetic construct
  misc_feature 1..20: note = HBV-targeting guide sequence portion
  source 1..20: mol_type = other RNA
aacgatgtatatttgcggga

SEQ ID NO: 203 - RNA, 20 nt, synthetic construct
  misc_feature 1..20: note = HBV-targeting guide sequence portion
  source 1..20: mol_type = other RNA
aacgcccaccaattcttgcc

SEQ ID NO: 204 - RNA, 20 nt, synthetic construct
  misc_feature 1..20: note = HBV-targeting guide sequence portion
  source 1..20: mol_type = other RNA
aacgccgcagacacatccag

SEQ ID NO: 205 - RNA, 20 nt, synthetic construct
  misc_feature 1..20: note = HBV-targeting guide sequence portion
  source 1..20: mol_type = other RNA
aacggcaggcagagaagagg

SEQ ID NO: 206 - RNA, 20 nt, synthetic construct
  misc_feature 1..20: note = HBV-targeting guide sequence portion
  source 1..20: mol_type = other RNA
aacggccaggtctgtgccaa

SEQ ID NO: 207 - RNA, 20 nt, synthetic construct
  misc_feature 1..20: note = HBV-targeting guide sequence portion
  source 1..20: mol_type = other RNA
aacgggctgaggcccactcc

SEQ ID NO: 208 - RNA, 20 nt, synthetic construct
  misc_feature 1..20: note = HBV-targeting guide sequence portion
  source 1..20: mol_type = other RNA
aacggggtaaaggttcaggt

SEQ ID NO: 209 - RNA, 20 nt, synthetic construct
  misc_feature 1..20: note = HBV-targeting guide sequence portion
  source 1..20: mol_type = other RNA
aacggtcctagagtatttgg

SEQ ID NO: 210 - RNA, 20 nt, synthetic construct
  misc_feature 1..20: note = HBV-targeting guide sequence portion
  source 1..20: mol_type = other RNA
aactaatgactctagctacc

SEQ ID NO: 211 - RNA, 20 nt, synthetic construct
  misc_feature 1..20: note = HBV-targeting guide sequence portion
  source 1..20: mol_type = other RNA
aactaccgtgtgtcttggcc

SEQ ID NO: 212 - RNA, 20 nt, synthetic construct
  misc_feature 1..20: note = HBV-targeting guide sequence portion
  source 1..20: mol_type = other RNA
aactagacactatttacaca

SEQ ID NO: 213 - RNA, 20 nt, synthetic construct
  misc_feature 1..20: note = HBV-targeting guide sequence portion
  source 1..20: mol_type = other RNA
aactagatgttctggataat

SEQ ID NO: 214 - RNA, 20 nt, synthetic construct
  misc_feature 1..20: note = HBV-targeting guide sequence portion
  source 1..20: mol_type = other RNA
aactattgtggtttcacatt

SEQ ID NO: 215 - RNA, 20 nt, synthetic construct
  misc_feature 1..20: note = HBV-targeting guide sequence portion
  source 1..20: mol_type = other RNA
aactccaacaatccagattg

SEQ ID NO: 216 - RNA, 20 nt, synthetic construct
  misc_feature 1..20: note = HBV-targeting guide sequence portion
  source 1..20: mol_type = other RNA
aactccacaaccttccacca

SEQ ID NO: 217 - RNA, 20 nt, synthetic construct
  misc_feature 1..20: note = HBV-targeting guide sequence portion
  source 1..20: mol_type = other RNA
aactccacagtagctccaaa

SEQ ID NO: 218 - RNA, 20 nt, synthetic construct
  misc_feature 1..20: note = HBV-targeting guide sequence portion
  source 1..20: mol_type = other RNA
aactcccggttaacaggcct

SEQ ID NO: 219 - RNA, 20 nt, synthetic construct
  misc_feature 1..20: note = HBV-targeting guide sequence portion
  source 1..20: mol_type = other RNA
aactccctcgcctcgcagac

SEQ ID NO: 220 - RNA, 20 nt, synthetic construct
  misc_feature 1..20: note = HBV-targeting guide sequence portion
  source 1..20: mol_type = other RNA
aactcctagccgcttgtttt

SEQ ID NO: 221 - RNA, 20 nt, synthetic construct
  misc_feature 1..20: note = HBV-targeting guide sequence portion
  source 1..20: mol_type = other RNA
aactcctcccagtctttaaa

SEQ ID NO: 222 - RNA, 20 nt, synthetic construct
  misc_feature 1..20: note = HBV-targeting guide sequence portion
  source 1..20: mol_type = other RNA
aactctgcaagatcccagag

SEQ ID NO: 223 - RNA, 20 nt, synthetic construct
  misc_feature 1..20: note = HBV-targeting guide sequence portion
  source 1..20: mol_type = other RNA
aactctgttgtcctctcccg

SEQ ID NO: 224 - RNA, 20 nt, synthetic construct
  misc_feature 1..20: note = HBV-targeting guide sequence portion
  source 1..20: mol_type = other RNA
aactgaaagccaaacagtgg

SEQ ID NO: 225 - RNA, 20 nt, synthetic construct
  misc_feature 1..20: note = HBV-targeting guide sequence portion
  source 1..20: mol_type = other RNA
aactgactactaggtcccta

SEQ ID NO: 226 - RNA, 20 nt, synthetic construct
  misc_feature 1..20: note = HBV-targeting guide sequence portion
  source 1..20: mol_type = other RNA
aactgagccaagagaaacgg

SEQ ID NO: 227 - RNA, 20 nt, synthetic construct
  misc_feature 1..20: note = HBV-targeting guide sequence portion
  source 1..20: mol_type = other RNA
aactgcacctgtattcccat

SEQ ID NO: 228 - RNA, 20 nt, synthetic construct
  misc_feature 1..20: note = HBV-targeting guide sequence portion
  source 1..20: mol_type = other RNA
aactggagccaccagcaggg

SEQ ID NO: 229 - RNA, 20 nt, synthetic construct
  misc_feature 1..20: note = HBV-targeting guide sequence portion
  source 1..20: mol_type = other RNA
aactggatcctgcgcgggac

SEQ ID NO: 230 - RNA, 20 nt, synthetic construct
  misc_feature 1..20: note = HBV-targeting guide sequence portion
  source 1..20: mol_type = other RNA
aactggtggtcgggaaagaa

SEQ ID NO: 231 - RNA, 20 nt, synthetic construct
  misc_feature 1..20: note = HBV-targeting guide sequence portion
  source 1..20: mol_type = other RNA
aactgtaagcgggcctacaa

SEQ ID NO: 232 - RNA, 20 nt, synthetic construct
  misc_feature 1..20: note = HBV-targeting guide sequence portion
  source 1..20: mol_type = other RNA
aactgttcacattttttgat

SEQ ID NO: 233 - RNA, 20 nt, synthetic construct
  misc_feature 1..20: note = HBV-targeting guide sequence portion
  source 1..20: mol_type = other RNA
aacttacaaggcctttctgt

SEQ ID NO: 234 - RNA, 20 nt, synthetic construct
  misc_feature 1..20: note = HBV-targeting guide sequence portion
  source 1..20: mol_type = other RNA
aacttgtcctggttatcgct

SEQ ID NO: 235 - RNA, 20 nt, synthetic construct
  misc_feature 1..20: note = HBV-targeting guide sequence portion
  source 1..20: mol_type = other RNA
aactttaggcccatatgagt

SEQ ID NO: 236 - RNA, 20 nt, synthetic construct
  misc_feature 1..20: note = HBV-targeting guide sequence portion
  source 1..20: mol_type = other RNA
aactttttcacctctgccta

SEQ ID NO: 237 - RNA, 20 nt, synthetic construct
  misc_feature 1..20: note = HBV-targeting guide sequence portion
  source 1..20: mol_type = other RNA
aagaaaattggtaacagcgg

SEQ ID NO: 238 - RNA, 20 nt, synthetic construct
  misc_feature 1..20: note = HBV-targeting guide sequence portion
  source 1..20: mol_type = other RNA
aagaaatgtgaaaccacaat

SEQ ID NO: 239 - RNA, 20 nt, synthetic construct
  misc_feature 1..20: note = HBV-targeting guide sequence portion
  source 1..20: mol_type = other RNA
aagaaccaacaagaagatga

SEQ ID NO: 240 - RNA, 20 nt, synthetic construct
  misc_feature 1..20: note = HBV-targeting guide sequence portion
  source 1..20: mol_type = other RNA
aagaactccctcgcctcgca

SEQ ID NO: 241 - RNA, 20 nt, synthetic construct
  misc_feature 1..20: note = HBV-targeting guide sequence portion
  source 1..20: mol_type = other RNA
aagaagaactccctcgcctc

SEQ ID NO: 242 - RNA, 20 nt, synthetic construct
  misc_feature 1..20: note = HBV-targeting guide sequence portion
  source 1..20: mol_type = other RNA
aagaagatgaggcatagcag

SEQ ID NO: 243 - RNA, 20 nt, synthetic construct
  misc_feature 1..20: note = HBV-targeting guide sequence portion
  source 1..20: mol_type = other RNA
aagaagtcagaaggcaaaaa

SEQ ID NO: 244 - RNA, 20 nt, synthetic construct
  misc_feature 1..20: note = HBV-targeting guide sequence portion
  source 1..20: mol_type = other RNA
aagaataaagccccgtaaaa

SEQ ID NO: 245 - RNA, 20 nt, synthetic construct
  misc_feature 1..20: note = HBV-targeting guide sequence portion
  source 1..20: mol_type = other RNA
aagaatatggtgacccacag

SEQ ID NO: 246 - RNA, 20 nt, synthetic construct
  misc_feature 1..20: note = HBV-targeting guide sequence portion
  source 1..20: mol_type = other RNA
aagaatcccagaggattgct

SEQ ID NO: 247 - RNA, 20 nt, synthetic construct
  misc_feature 1..20: note = HBV-targeting guide sequence portion
  source 1..20: mol_type = other RNA
aagaatcctcacaataccgc

SEQ ID NO: 248 - RNA, 20 nt, synthetic construct
  misc_feature 1..20: note = HBV-targeting guide sequence portion
  source 1..20: mol_type = other RNA
aagaatgtttcagaaaactc

SEQ ID NO: 249 - RNA, 20 nt, synthetic construct
  misc_feature 1..20: note = HBV-targeting guide sequence portion
  source 1..20: mol_type = other RNA
aagaattgcttgcctgagtg

SEQ ID NO: 250 - RNA, 20 nt, synthetic construct
  misc_feature 1..20: note = HBV-targeting guide sequence portion
  source 1..20: mol_type = other RNA
aagaattggtgggcgttcac

SEQ ID NO: 251 - RNA, 20 nt, synthetic construct
  misc_feature 1..20: note = HBV-targeting guide sequence portion
  source 1..20: mol_type = other RNA
aagaatttggagctactgtg

SEQ ID NO: 252 - RNA, 20 nt, synthetic construct
  misc_feature 1..20: note = HBV-targeting guide sequence portion
  source 1..20: mol_type = other RNA
aagacaaaagaaaattggta

SEQ ID NO: 253 - RNA, 20 nt, synthetic construct
  misc_feature 1..20: note = HBV-targeting guide sequence portion
  source 1..20: mol_type = other RNA
aagacaagaaatgtgaaacc

SEQ ID NO: 254 - RNA, 20 nt, synthetic construct
  misc_feature 1..20: note = HBV-targeting guide sequence portion
  source 1..20: mol_type = other RNA
aagacacacggtagttcccc

SEQ ID NO: 255 - RNA, 20 nt, synthetic construct
  misc_feature 1..20: note = HBV-targeting guide sequence portion
  source 1..20: mol_type = other RNA
aagacaccaaatactctagg

SEQ ID NO: 256 - RNA, 20 nt, synthetic construct
  misc_feature 1..20: note = HBV-targeting guide sequence portion
  source 1..20: mol_type = other RNA
aagacaggtacagtagaaga

SEQ ID NO: 257 - RNA, 20 nt, synthetic construct
  misc_feature 1..20: note = HBV-targeting guide sequence portion
  source 1..20: mol_type = other RNA
aagacccacaattcgttgac

SEQ ID NO: 258 - RNA, 20 nt, synthetic construct
  misc_feature 1..20: note = HBV-targeting guide sequence portion
  source 1..20: mol_type = other RNA
aagaccttgggcaagaattg

SEQ ID NO: 259 - RNA, 20 nt, synthetic construct
  misc_feature 1..20: note = HBV-targeting guide sequence portion
  source 1..20: mol_type = other RNA
aagacggttgaaattgatta

SEQ ID NO: 260 - RNA, 20 nt, synthetic construct
  misc_feature 1..20: note = HBV-targeting guide sequence portion
  source 1..20: mol_type = other RNA
aagactgggaggagttgggg

SEQ ID NO: 261 - RNA, 20 nt, synthetic construct
  misc_feature 1..20: note = HBV-targeting guide sequence portion
  source 1..20: mol_type = other RNA
aagactgtttgtttaaagac

SEQ ID NO: 262 - RNA, 20 nt, synthetic construct
  misc_feature 1..20: note = HBV-targeting guide sequence portion
  source 1..20: mol_type = other RNA
aagagaaacgggctgaggcc

SEQ ID NO: 263 - RNA, 20 nt, synthetic construct
  misc_feature 1..20: note = HBV-targeting guide sequence portion
  source 1..20: mol_type = other RNA
aagagaaacggtcctagagt

SEQ ID NO: 264 - RNA, 20 nt, synthetic construct
  misc_feature 1..20: note = HBV-targeting guide sequence portion
  source 1..20: mol_type = other RNA
aagagaataaccccatctct

SEQ ID NO: 265 - RNA, 20 nt, synthetic construct
  misc_feature 1..20: note = HBV-targeting guide sequence portion
  source 1..20: mol_type = other RNA
aagagaggtgcgccccgtgg

SEQ ID NO: 266 - RNA, 20 nt, synthetic construct
  misc_feature 1..20: note = HBV-targeting guide sequence portion
  source 1..20: mol_type = other RNA
aagagagtgtcaacacatag

SEQ ID NO: 267 - RNA, 20 nt, synthetic construct
  misc_feature 1..20: note = HBV-targeting guide sequence portion
  source 1..20: mol_type = other RNA
aagagatgattaggcagagg

SEQ ID NO: 268 - RNA, 20 nt, synthetic construct
  misc_feature 1..20: note = HBV-targeting guide sequence portion
  source 1..20: mol_type = other RNA
aagagatggggttattctct

SEQ ID NO: 269 - RNA, 20 nt, synthetic construct
  misc_feature 1..20: note = HBV-targeting guide sequence portion
  source 1..20: mol_type = other RNA
aagagctacagcatggggca

SEQ ID NO: 270 - RNA, 20 nt, synthetic construct
  misc_feature 1..20: note = HBV-targeting guide sequence portion
  source 1..20: mol_type = other RNA
aagaggaagatgataaaacg

SEQ ID NO: 271 - RNA, 20 nt, synthetic construct
  misc_feature 1..20: note = HBV-targeting guide sequence portion
  source 1..20: mol_type = other RNA
aagaggacgacagggcccca

SEQ ID NO: 272 - RNA, 20 nt, synthetic construct
  misc_feature 1..20: note = HBV-targeting guide sequence portion
  source 1..20: mol_type = other RNA
aagaggactcttggactctc

SEQ ID NO: 273 - RNA, 20 nt, synthetic construct
  misc_feature 1..20: note = HBV-targeting guide sequence portion
  source 1..20: mol_type = other RNA
aagagggtgttttccaatga

SEQ ID NO: 274 - RNA, 20 nt, synthetic construct
  misc_feature 1..20: note = HBV-targeting guide sequence portion
  source 1..20: mol_type = other RNA
aagagtcctcttatgtaaga

SEQ ID NO: 275 - RNA, 20 nt, synthetic construct
  misc_feature 1..20: note = HBV-targeting guide sequence portion
  source 1..20: mol_type = other RNA
aagatattatcaaaaaatgt

SEQ ID NO: 276 - RNA, 20 nt, synthetic construct
  misc_feature 1..20: note = HBV-targeting guide sequence portion
  source 1..20: mol_type = other RNA
aagatcaagcatctagggac

SEQ ID NO: 277 - RNA, 20 nt, synthetic construct
  misc_feature 1..20: note = HBV-targeting guide sequence portion
  source 1..20: mol_type = other RNA
aagatcattaatctaatctc

SEQ ID NO: 278 - RNA, 20 nt, synthetic construct
  misc_feature 1..20: note = HBV-targeting guide sequence portion
  source 1..20: mol_type = other RNA
aagatcccagagtgagaggc

SEQ ID NO: 279 - RNA, 20 nt, synthetic construct
  misc_feature 1..20: note = HBV-targeting guide sequence portion
  source 1..20: mol_type = other RNA
aagatctcaatcgccgcgtc

SEQ ID NO: 280 - RNA, 20 nt, synthetic construct
  misc_feature 1..20: note = HBV-targeting guide sequence portion
  source 1..20: mol_type = other RNA
aagatctcaatctcggggat

SEQ ID NO: 281 - RNA, 20 nt, synthetic construct
  misc_feature 1..20: note = HBV-targeting guide sequence portion
  source 1..20: mol_type = other RNA
aagatctcgtacggaaggaa

SEQ ID NO: 282 - RNA, 20 nt, synthetic construct
  misc_feature 1..20: note = HBV-targeting guide sequence portion
  source 1..20: mol_type = other RNA
aagatgaggcatagcagcag

SEQ ID NO: 283 - RNA, 20 nt, synthetic construct
  misc_feature 1..20: note = HBV-targeting guide sequence portion
  source 1..20: mol_type = other RNA
aagatgataaaacgccgcag

SEQ ID NO: 284 - RNA, 20 nt, synthetic construct
  misc_feature 1..20: note = HBV-targeting guide sequence portion
  source 1..20: mol_type = other RNA
aagatgctgtacagacttgg

SEQ ID NO: 285 - RNA, 20 nt, synthetic construct
  misc_feature 1..20: note = HBV-targeting guide sequence portion
  source 1..20: mol_type = other RNA
aagattctgccccatgctgt

SEQ ID NO: 286 - RNA, 20 nt, synthetic construct
  misc_feature 1..20: note = HBV-targeting guide sequence portion
  source 1..20: mol_type = other RNA
aagattgacgatatgtgaga

SEQ ID NO: 287 - RNA, 20 nt, synthetic construct
  misc_feature 1..20: note = HBV-targeting guide sequence portion
  source 1..20: mol_type = other RNA
aagcaattctttgctgggga

SEQ ID NO: 288 - RNA, 20 nt, synthetic construct
  misc_feature 1..20: note = HBV-targeting guide sequence portion
  source 1..20: mol_type = other RNA
aagcaggataaccacattgt

SEQ ID NO: 289 - RNA, 20 nt, synthetic construct
  misc_feature 1..20: note = HBV-targeting guide sequence portion
  source 1..20: mol_type = other RNA
aagcaggctttcactttttc

SEQ ID NO: 290 - RNA, 20 nt, synthetic construct
  misc_feature 1..20: note = HBV-targeting guide sequence portion
  source 1..20: mol_type = other RNA
aagcatctagggacctagta

SEQ ID NO: 291 - RNA, 20 nt, synthetic construct
  misc_feature 1..20: note = HBV-targeting guide sequence portion
  source 1..20: mol_type = other RNA
aagccaaacagtgggggaaa

SEQ ID NO: 292 - RNA, 20 nt, synthetic construct
  misc_feature 1..20: note = HBV-targeting guide sequence portion
  source 1..20: mol_type = other RNA
aagccacccaaggcacagct

SEQ ID NO: 293 - RNA, 20 nt, synthetic construct
  misc_feature 1..20: note = HBV-targeting guide sequence portion
  source 1..20: mol_type = other RNA
aagcccaggatgatgggatg

SEQ ID NO: 294 - RNA, 20 nt, synthetic construct
  misc_feature 1..20: note = HBV-targeting guide sequence portion
  source 1..20: mol_type = other RNA
aagccccaaccagtgggggt

SEQ ID NO: 295 - RNA, 20 nt, synthetic construct
  misc_feature 1..20: note = HBV-targeting guide sequence portion
  source 1..20: mol_type = other RNA
aagccccgtaaaatttccca

SEQ ID NO: 296 - RNA, 20 nt, synthetic construct
  misc_feature 1..20: note = HBV-targeting guide sequence portion
  source 1..20: mol_type = other RNA
aagccctacgaaccactgaa

SEQ ID NO: 297 - RNA, 20 nt, synthetic construct
  misc_feature 1..20: note = HBV-targeting guide sequence portion
  source 1..20: mol_type = other RNA
aagcctccaagctgtgcctt

SEQ ID NO: 298 - RNA, 20 nt, synthetic construct
  misc_feature 1..20: note = HBV-targeting guide sequence portion
  source 1..20: mol_type = other RNA
aagcctgcttagattgaata

SEQ ID NO: 299 - RNA, 20 nt, synthetic construct
  misc_feature 1..20: note = HBV-targeting guide sequence portion
  source 1..20: mol_type = other RNA
aagcgaagtgcacacggtcc

SEQ ID NO: 300 - RNA, 20 nt, synthetic construct
  misc_feature 1..20: note = HBV-targeting guide sequence portion
  source 1..20: mol_type = other RNA
aagcggcctcgagatgggtc

SEQ ID NO: 301 - RNA, 20 nt, synthetic construct
  misc_feature 1..20: note = HBV-targeting guide sequence portion
  source 1..20: mol_type = other RNA
aagcggctaggagttccgca

SEQ ID NO: 302 - RNA, 20 nt, synthetic construct
  misc_feature 1..20: note = HBV-targeting guide sequence portion
  source 1..20: mol_type = other RNA
aagcgggcctacaaactgtt

SEQ ID NO: 303 - RNA, 20 nt, synthetic construct
  misc_feature 1..20: note = HBV-targeting guide sequence portion
  source 1..20: mol_type = other RNA
aagctggaggagtgcgaatc

SEQ ID NO: 304 - RNA, 20 nt, synthetic construct
  misc_feature 1..20: note = HBV-targeting guide sequence portion
  source 1..20: mol_type = other RNA
aagctgtgccttgggtggct

SEQ ID NO: 305 - RNA, 20 nt, synthetic construct
  misc_feature 1..20: note = HBV-targeting guide sequence portion
  source 1..20: mol_type = other RNA
aaggaaaaccccgcctgtaa

SEQ ID NO: 306 - RNA, 20 nt, synthetic construct
  misc_feature 1..20: note = HBV-targeting guide sequence portion
  source 1..20: mol_type = other RNA
aaggaaagaagtcagaaggc

SEQ ID NO: 307 - RNA, 20 nt, synthetic construct
  misc_feature 1..20: note = HBV-targeting guide sequence portion
  source 1..20: mol_type = other RNA
aaggaacctctatgtatccc

SEQ ID NO: 308 - RNA, 20 nt, synthetic construct
  misc_feature 1..20: note = HBV-targeting guide sequence portion
  source 1..20: mol_type = other RNA
aaggacgtcccgcgcaggat

SEQ ID NO: 309 - RNA, 20 nt, synthetic construct
  misc_feature 1..20: note = HBV-targeting guide sequence portion
  source 1..20: mol_type = other RNA
aaggatccctggccagacgc

SEQ ID NO: 310 - RNA, 20 nt, synthetic construct
  misc_feature 1..20: note = HBV-targeting guide sequence portion
  source 1..20: mol_type = other RNA
aaggcaaaaacgagagtaac

SEQ ID NO: 311 - RNA, 20 nt, synthetic construct
  misc_feature 1..20: note = HBV-targeting guide sequence portion
  source 1..20: mol_type = other RNA
aaggcacagacggggagtcc

SEQ ID NO: 312 - RNA, 20 nt, synthetic construct
  misc_feature 1..20: note = HBV-targeting guide sequence portion
  source 1..20: mol_type = other RNA
aaggcacagcttggaggctt

SEQ ID NO: 313 - RNA, 20 nt, synthetic construct
  misc_feature 1..20: note = HBV-targeting guide sequence portion
  source 1..20: mol_type = other RNA
aaggcatcccgatacagagc

SEQ ID NO: 314 - RNA, 20 nt, synthetic construct
  misc_feature 1..20: note = HBV-targeting guide sequence portion
  source 1..20: mol_type = other RNA
aaggcctccgtgcggtgggg

SEQ ID NO: 315 - RNA, 20 nt, synthetic construct
  misc_feature 1..20: note = HBV-targeting guide sequence portion
  source 1..20: mol_type = other RNA
aaggccttgtaagttggcga

SEQ ID NO: 316 - RNA, 20 nt, synthetic construct
  misc_feature 1..20: note = HBV-targeting guide sequence portion
  source 1..20: mol_type = other RNA
aaggcctttctgtgtaaaca

SEQ ID NO: 317 - RNA, 20 nt, synthetic construct
  misc_feature 1..20: note = HBV-targeting guide sequence portion
  source 1..20: mol_type = other RNA
aaggcgggtgttttatataa

SEQ ID NO: 318 - RNA, 20 nt, synthetic construct
  misc_feature 1..20: note = HBV-targeting guide sequence portion
  source 1..20: mol_type = other RNA
aaggctgggtccaactggtg

SEQ ID NO: 319 - RNA, 20 nt, synthetic construct
  misc_feature 1..20: note = HBV-targeting guide sequence portion
  source 1..20: mol_type = other RNA
aagggactcaagatgctgta

SEQ ID NO: 320 - RNA, 20 nt, synthetic construct
  misc_feature 1..20: note = HBV-targeting guide sequence portion
  source 1..20: mol_type = other RNA
aagggatactaacattgaga

SEQ ID NO: 321 - RNA, 20 nt, synthetic construct
  misc_feature 1..20: note = HBV-targeting guide sequence portion
  source 1..20: mol_type = other RNA
aagggcaagtatttggtgaa

SEQ ID NO: 322 - RNA, 20 nt, synthetic construct
  misc_feature 1..20: note = HBV-targeting guide sequence portion
  source 1..20: mol_type = other RNA
aagggcattaaagcaggata

SEQ ID NO: 323 - RNA, 20 nt, synthetic construct
  misc_feature 1..20: note = HBV-targeting guide sequence portion
  source 1..20: mol_type = other RNA
aaggggcagcaaaacccaga

SEQ ID NO: 324 - RNA, 20 nt, synthetic construct
  misc_feature 1..20: note = HBV-targeting guide sequence portion
  source 1..20: mol_type = other RNA
aagggtattaaaccttatta

SEQ ID NO: 325 - RNA, 20 nt, synthetic construct
  misc_feature 1..20: note = HBV-targeting guide sequence portion
  source 1..20: mol_type = other RNA
aaggtaggagctggagcatt

SEQ ID NO: 326 - RNA, 20 nt, synthetic construct
  misc_feature 1..20: note = HBV-targeting guide sequence portion
  source 1..20: mol_type = other RNA
aaggtatgtttcccgtctgt

SEQ ID NO: 327 - RNA, 20 nt, synthetic construct
  misc_feature 1..20: note = HBV-targeting guide sequence portion
  source 1..20: mol_type = other RNA
aaggtcggtcgttgacattg

SEQ ID NO: 328 - RNA, 20 nt, synthetic construct
  misc_feature 1..20: note = HBV-targeting guide sequence portion
  source 1..20: mol_type = other RNA
aaggtcttacataagaggac

SEQ ID NO: 329 - RNA, 20 nt, synthetic construct
  misc_feature 1..20: note = HBV-targeting guide sequence portion
  source 1..20: mol_type = other RNA
aaggtgggaaattttacggg

SEQ ID NO: 330 - RNA, 20 nt, synthetic construct
  misc_feature 1..20: note = HBV-targeting guide sequence portion
  source 1..20: mol_type = other RNA
aaggttcaggtattgtttac

SEQ ID NO: 331 - RNA, 20 nt, synthetic construct
  misc_feature 1..20: note = HBV-targeting guide sequence portion
  source 1..20: mol_type = other RNA
aaggttccacgcatgcgctg

SEQ ID NO: 332 - RNA, 20 nt, synthetic construct
  misc_feature 1..20: note = HBV-targeting guide sequence portion
  source 1..20: mol_type = other RNA
aaggtttaatacccttatcc

SEQ ID NO: 333 - RNA, 20 nt, synthetic construct
  misc_feature 1..20: note = HBV-targeting guide sequence portion
  source 1..20: mol_type = other RNA
aaggtttgcattatgccctg

SEQ ID NO: 334 - RNA, 20 nt, synthetic construct
  misc_feature 1..20: note = HBV-targeting guide sequence portion
  source 1..20: mol_type = other RNA
aaggttttgtacagcaacag

SEQ ID NO: 335 - RNA, 20 nt, synthetic construct
  misc_feature 1..20: note = HBV-targeting guide sequence portion
  source 1..20: mol_type = other RNA
aagtaagacaagaaatgtga

SEQ ID NO: 336 - RNA, 20 nt, synthetic construct
  misc_feature 1..20: note = HBV-targeting guide sequence portion
  source 1..20: mol_type = other RNA
aagtaatgattaactagatg

SEQ ID NO: 337 - RNA, 20 nt, synthetic construct
  misc_feature 1..20: note = HBV-targeting guide sequence portion
  source 1..20: mol_type = other RNA
aagtatgcctcaaggtcggt

SEQ ID NO: 338 - RNA, 20 nt, synthetic construct
  misc_feature 1..20: note = HBV-targeting guide sequence portion
  source 1..20: mol_type = other RNA
aagtatttggtgaatttagg

SEQ ID NO: 339 - RNA, 20 nt, synthetic construct
  misc_feature 1..20: note = HBV-targeting guide sequence portion
  source 1..20: mol_type = other RNA
aagtcagaaggcaaaaacga

SEQ ID NO: 340 - RNA, 20 nt, synthetic construct
  misc_feature 1..20: note = HBV-targeting guide sequence portion
  source 1..20: mol_type = other RNA
aagtccaccacgagtctaga

SEQ ID NO: 341 - RNA, 20 nt, synthetic construct
  misc_feature 1..20: note = HBV-targeting guide sequence portion
  source 1..20: mol_type = other RNA
aagtcccaatctggattgtt

SEQ ID NO: 342 - RNA, 20 nt, synthetic construct
  misc_feature 1..20: note = HBV-targeting guide sequence portion
  source 1..20: mol_type = other RNA
aagtctccggaagtgttgat

SEQ ID NO: 343 - RNA, 20 nt, synthetic construct
  misc_feature 1..20: note = HBV-targeting guide sequence portion
  source 1..20: mol_type = other RNA
aagtctgtacagcatcttga

SEQ ID NO: 344 - RNA, 20 nt, synthetic construct
  misc_feature 1..20: note = HBV-targeting guide sequence portion
  source 1..20: mol_type = other RNA
aagtgaaagcctgcttagat

SEQ ID NO: 345 - RNA, 20 nt, synthetic construct
  misc_feature 1..20: note = HBV-targeting guide sequence portion
  source 1..20: mol_type = other RNA
aagtgcacacggtccggcag

SEQ ID NO: 346 - RNA, 20 nt, synthetic construct
  misc_feature 1..20: note = HBV-targeting guide sequence portion
  source 1..20: mol_type = other RNA
aagtgtgtcaacgaattgtg

SEQ ID NO: 347 - RNA, 20 nt, synthetic construct
  misc_feature 1..20: note = HBV-targeting guide sequence portion
  source 1..20: mol_type = other RNA
aagtgttgataggatagggg

SEQ ID NO: 348 - RNA, 20 nt, synthetic construct
  misc_feature 1..20: note = HBV-targeting guide sequence portion
  source 1..20: mol_type = other RNA
aagtgtttgctgatgcaacc

SEQ ID NO: 349 - RNA, 20 nt, synthetic construct
  misc_feature 1..20: note = HBV-targeting guide sequence portion
  source 1..20: mol_type = other RNA
aagttcagacaactattgtg

SEQ ID NO: 350 - RNA, 20 nt, synthetic construct
  misc_feature 1..20: note = HBV-targeting guide sequence portion
  source 1..20: mol_type = other RNA
aagttgcatggtgctggtgc

SEQ ID NO: 351 - RNA, 20 nt, synthetic construct
  misc_feature 1..20: note = HBV-targeting guide sequence portion
  source 1..20: mol_type = other RNA
aagttggaggacaggaggtt

SEQ ID NO: 352 - RNA, 20 nt, synthetic construct
  misc_feature 1..20: note = HBV-targeting guide sequence portion
  source 1..20: mol_type = other RNA
aagttggcgaaaaagtgaaa

SEQ ID NO: 353 - RNA, 20 nt, synthetic construct
  misc_feature 1..20: note = HBV-targeting guide sequence portion
  source 1..20: mol_type = other RNA
aataaagccccgtaaaattt

SEQ ID NO: 354 - RNA, 20 nt, synthetic construct
  misc_feature 1..20: note = HBV-targeting guide sequence portion
  source 1..20: mol_type = other RNA
aataaccccatctctttgtt

SEQ ID NO: 355 - RNA, 20 nt, synthetic construct
  misc_feature 1..20: note = HBV-targeting guide sequence portion
  source 1..20: mol_type = other RNA
aataaggtttaataccctta

SEQ ID NO: 356 - RNA, 20 nt, synthetic construct
  misc_feature 1..20: note = HBV-targeting guide sequence portion
  source 1..20: mol_type = other RNA
aatacaggtgcagtttccat

SEQ ID NO: 357 - RNA, 20 nt, synthetic construct
  misc_feature 1..20: note = HBV-targeting guide sequence portion
  source 1..20: mol_type = other RNA
aatacatgcatacaagggca

SEQ ID NO: 358 - RNA, 20 nt, synthetic construct
  misc_feature 1..20: note = HBV-targeting guide sequence portion
  source 1..20: mol_type = other RNA
aataccacatcatccatata

SEQ ID NO: 359 - RNA, 20 nt, synthetic construct
  misc_feature 1..20: note = HBV-targeting guide sequence portion
  source 1..20: mol_type = other RNA
aatacccttatccaagggca

SEQ ID NO: 360 - RNA, 20 nt, synthetic construct
  misc_feature 1..20: note = HBV-targeting guide sequence portion
  source 1..20: mol_type = other RNA
aataccgcagagtctagact

SEQ ID NO: 361 - RNA, 20 nt, synthetic construct
  misc_feature 1..20: note = HBV-targeting guide sequence portion
  source 1..20: mol_type = other RNA
aatacctgaacctttacccc

SEQ ID NO: 362 - RNA, 20 nt, synthetic construct
  misc_feature 1..20: note = HBV-targeting guide sequence portion
  source 1..20: mol_type = other RNA
aatactctaggaccgtttct

SEQ ID NO: 363 - RNA, 20 nt, synthetic construct
  misc_feature 1..20: note = HBV-targeting guide sequence portion
  source 1..20: mol_type = other RNA
aatacttgcccttggataag

SEQ ID NO: 364 - RNA, 20 nt, synthetic construct
  misc_feature 1..20: note = HBV-targeting guide sequence portion
  source 1..20: mol_type = other RNA
aataggcctgttaaccggga

SEQ ID NO: 365 - RNA, 20 nt, synthetic construct
  misc_feature 1..20: note = HBV-targeting guide sequence portion
  source 1..20: mol_type = other RNA
aatagtgtctagtttggaag

SEQ ID NO: 366 - RNA, 20 nt, synthetic construct
  misc_feature 1..20: note = HBV-targeting guide sequence portion
  source 1..20: mol_type = other RNA
aatagttgtctgaactttag

SEQ ID NO: 367 - RNA, 20 nt, synthetic construct
  misc_feature 1..20: note = HBV-targeting guide sequence portion
  source 1..20: mol_type = other RNA
aatatacatcgttcccatgg

SEQ ID NO: 368 - RNA, 20 nt, synthetic construct
  misc_feature 1..20: note = HBV-targeting guide sequence portion
  source 1..20: mol_type = other RNA
aatatacatctacaccaaga

SEQ ID NO: 369 - RNA, 20 nt, synthetic construct
  misc_feature 1..20: note = HBV-targeting guide sequence portion
  source 1..20: mol_type = other RNA
aatatcttggtgtagatgta

SEQ ID NO: 370 - RNA, 20 nt, synthetic construct
  misc_feature 1..20: note = HBV-targeting guide sequence portion
  source 1..20: mol_type = other RNA
aatatggtgacccacagaat

SEQ ID NO: 371 - RNA, 20 nt, synthetic construct
  misc_feature 1..20: note = HBV-targeting guide sequence portion
  source 1..20: mol_type = other RNA
aatcaaagaatgtttcagaa

SEQ ID NO: 372 - RNA, 20 nt, synthetic construct
  misc_feature 1..20: note = HBV-targeting guide sequence portion
  source 1..20: mol_type = other RNA
aatcaataggcctgttaacc

SEQ ID NO: 373 - RNA, 20 nt, synthetic construct
  misc_feature 1..20: note = HBV-targeting guide sequence portion
  source 1..20: mol_type = other RNA
aatcaatgacatagcccatg

SEQ ID NO: 374 - RNA, 20 nt, synthetic construct
  misc_feature 1..20: note = HBV-targeting guide sequence portion
  source 1..20: mol_type = other RNA
aatcaatttcaaccgtcttt

SEQ ID NO: 375 - RNA, 20 nt, synthetic construct
  misc_feature 1..20: note = HBV-targeting guide sequence portion
  source 1..20: mol_type = other RNA
aatcacatcatacacaaaat

SEQ ID NO: 376 - RNA, 20 nt, synthetic construct
  misc_feature 1..20: note = HBV-targeting guide sequence portion
  source 1..20: mol_type = other RNA
aatcactcaccaacctcctg

SEQ ID NO: 377 - RNA, 20 nt, synthetic construct
  misc_feature 1..20: note = HBV-targeting guide sequence portion
  source 1..20: mol_type = other RNA
aatcatctcttgttcatgtc

SEQ ID NO: 378 - RNA, 20 nt, synthetic construct
  misc_feature 1..20: note = HBV-targeting guide sequence portion
  source 1..20: mol_type = other RNA
aatcattacttccaaactag

SEQ ID NO: 379 - RNA, 20 nt, synthetic construct
  misc_feature 1..20: note = HBV-targeting guide sequence portion
  source 1..20: mol_type = other RNA
aatccacactccaaaagaca

SEQ ID NO: 380 - RNA, 20 nt, synthetic construct
  misc_feature 1..20: note = HBV-targeting guide sequence portion
  source 1..20: mol_type = other RNA
aatccagattgggacttcaa

SEQ ID NO: 381 - RNA, 20 nt, synthetic construct
  misc_feature 1..20: note = HBV-targeting guide sequence portion
  source 1..20: mol_type = other RNA
aatcccaacaaggatccctg

SEQ ID NO: 382 - RNA, 20 nt, synthetic construct
  misc_feature 1..20: note = HBV-targeting guide sequence portion
  source 1..20: mol_type = other RNA
aatcccagaggattgctggt

SEQ ID NO: 383 - RNA, 20 nt, synthetic construct
  misc_feature 1..20: note = HBV-targeting guide sequence portion
  source 1..20: mol_type = other RNA
aatcccgcggacgacccatc

SEQ ID NO: 384 - RNA, 20 nt, synthetic construct
  misc_feature 1..20: note = HBV-targeting guide sequence portion
  source 1..20: mol_type = other RNA
aatccgcctcctgcctctac

SEQ ID NO: 385 - RNA, 20 nt, synthetic construct
  misc_feature 1..20: note = HBV-targeting guide sequence portion
  source 1..20: mol_type = other RNA
aatcctcacaataccgcaga

SEQ ID NO: 386 - RNA, 20 nt, synthetic construct
  misc_feature 1..20: note = HBV-targeting guide sequence portion
  source 1..20: mol_type = other RNA
aatcctcgagaagattgacg

SEQ ID NO: 387 - RNA, 20 nt, synthetic construct
  misc_feature 1..20: note = HBV-targeting guide sequence portion
  source 1..20: mol_type = other RNA
aatcctctgggattctttcc

SEQ ID NO: 388 - RNA, 20 nt, synthetic construct
  misc_feature 1..20: note = HBV-targeting guide sequence portion
  source 1..20: mol_type = other RNA
aatcctgatgtgatgttctc

SEQ ID NO: 389 - RNA, 20 nt, synthetic construct
  misc_feature 1..20: note = HBV-targeting guide sequence portion
  source 1..20: mol_type = other RNA
aatcgccagtcaggacggca

SEQ ID NO: 390 - RNA, 20 nt, synthetic construct
  misc_feature 1..20: note = HBV-targeting guide sequence portion
  source 1..20: mol_type = other RNA
aatcgccgcgtcgcagaaga

SEQ ID NO: 391 - RNA, 20 nt, synthetic construct
  misc_feature 1..20: note = HBV-targeting guide sequence portion
  source 1..20: mol_type = other RNA
aatctaagcaggctttcact

SEQ ID NO: 392 - RNA, 20 nt, synthetic construct
  misc_feature 1..20: note = HBV-targeting guide sequence portion
  source 1..20: mol_type = other RNA
aatctaatctcctcccccaa

SEQ ID NO: 393 - RNA, 20 nt, synthetic construct
  misc_feature 1..20: note = HBV-targeting guide sequence portion
  source 1..20: mol_type = other RNA
aatctcctcccccaactcct

SEQ ID NO: 394 - RNA, 20 nt, synthetic construct
  misc_feature 1..20: note = HBV-targeting guide sequence portion
  source 1..20: mol_type = other RNA
aatctcggggatctcaatgt

SEQ ID NO: 395 - RNA, 20 nt, synthetic construct
  misc_feature 1..20: note = HBV-targeting guide sequence portion
  source 1..20: mol_type = other RNA
aatctggattgttggagttt

SEQ ID NO: 396 - RNA, 20 nt, synthetic construct
  misc_feature 1..20: note = HBV-targeting guide sequence portion
  source 1..20: mol_type = other RNA
aatcttctcgaggattgggg

SEQ ID NO: 397 - RNA, 20 nt, synthetic construct
  misc_feature 1..20: note = HBV-targeting guide sequence portion
  source 1..20: mol_type = other RNA
aatctttccaccagcaatcc

SEQ ID NO: 398 - RNA, 20 nt, synthetic construct
  misc_feature 1..20: note = HBV-targeting guide sequence portion
  source 1..20: mol_type = other RNA
aatgacatagcccatgaaat

SEQ ID NO: 399 - RNA, 20 nt, synthetic construct
  misc_feature 1..20: note = HBV-targeting guide sequence portion
  source 1..20: mol_type = other RNA
aatgactctagctacctggg

SEQ ID NO: 400 - RNA, 20 nt, synthetic construct
  misc_feature 1..20: note = HBV-targeting guide sequence portion
  source 1..20: mol_type = other RNA
aatgagaaaagacggttgaa

SEQ ID NO: 401 - RNA, 20 nt, synthetic construct
  misc_feature 1..20: note = HBV-targeting guide sequence portion
  source 1..20: mol_type = other RNA
aatgaggcgctatgtgttga

SEQ ID NO: 402 - RNA, 20 nt, synthetic construct
  misc_feature 1..20: note = HBV-targeting guide sequence portion
  source 1..20: mol_type = other RNA
aatgagggttaaagacaggt

SEQ ID NO: 403 - RNA, 20 nt, synthetic construct
  misc_feature 1..20: note = HBV-targeting guide sequence portion
  source 1..20: mol_type = other RNA
aatgatccccaacaatcaat

SEQ ID NO: 404 - RNA, 20 nt, synthetic construct
  misc_feature 1..20: note = HBV-targeting guide sequence portion
  source 1..20: mol_type = other RNA
aatgatctttgtactaggag

SEQ ID NO: 405 - RNA, 20 nt, synthetic construct
  misc_feature 1..20: note = HBV-targeting guide sequence portion
  source 1..20: mol_type = other RNA
aatgattaactagatgttct

SEQ ID NO: 406 - RNA, 20 nt, synthetic construct
  misc_feature 1..20: note = HBV-targeting guide sequence portion
  source 1..20: mol_type = other RNA
aatgcaaaccttgccagcaa

SEQ ID NO: 407 - RNA, 20 nt, synthetic construct
  misc_feature 1..20: note = HBV-targeting guide sequence portion
  source 1..20: mol_type = other RNA
aatgcccctatcctatcaac

SEQ ID NO: 408 - RNA, 20 nt, synthetic construct
  misc_feature 1..20: note = HBV-targeting guide sequence portion
  source 1..20: mol_type = other RNA
aatgcccttgtatgcatgta

SEQ ID NO: 409 - RNA, 20 nt, synthetic construct
  misc_feature 1..20: note = HBV-targeting guide sequence portion
  source 1..20: mol_type = other RNA
aatgctcaggagactccaag

SEQ ID NO: 410 - RNA, 20 nt, synthetic construct
  misc_feature 1..20: note = HBV-targeting guide sequence portion
  source 1..20: mol_type = other RNA
aatgctccagctcctacctt

SEQ ID NO: 411 - RNA, 20 nt, synthetic construct
  misc_feature 1..20: note = HBV-targeting guide sequence portion
  source 1..20: mol_type = other RNA
aatggcactagtaaactgag

SEQ ID NO: 412 - RNA, 20 nt, synthetic construct
  misc_feature 1..20: note = HBV-targeting guide sequence portion
  source 1..20: mol_type = other RNA
aatgtacacccaaagacaaa

SEQ ID NO: 413 - RNA, 20 nt, synthetic construct
  misc_feature 1..20: note = HBV-targeting guide sequence portion
  source 1..20: mol_type = other RNA
aatgtcaacgaccgaccttg

SEQ ID NO: 414 - RNA, 20 nt, synthetic construct
  misc_feature 1..20: note = HBV-targeting guide sequence portion
  source 1..20: mol_type = other RNA
aatgtccatgccctaaagcc

SEQ ID NO: 415 - RNA, 20 nt, synthetic construct
  misc_feature 1..20: note = HBV-targeting guide sequence portion
  source 1..20: mol_type = other RNA
aatgtgaaaccacaatagtt

SEQ ID NO: 416 - RNA, 20 nt, synthetic construct
  misc_feature 1..20: note = HBV-targeting guide sequence portion
  source 1..20: mol_type = other RNA
aatgtgaacagtttgtaggc

SEQ ID NO: 417 - RNA, 20 nt, synthetic construct
  misc_feature 1..20: note = HBV-targeting guide sequence portion
  source 1..20: mol_type = other RNA
aatgtggttatcctgcttta

SEQ ID NO: 418 - RNA, 20 nt, synthetic construct
  misc_feature 1..20: note = HBV-targeting guide sequence portion
  source 1..20: mol_type = other RNA
aatgttagtatcccttggac

SEQ ID NO: 419 - RNA, 20 nt, synthetic construct
  misc_feature 1..20: note = HBV-targeting guide sequence portion
  source 1..20: mol_type = other RNA
aatgtttcagaaaactcccg

SEQ ID NO: 420 - RNA, 20 nt, synthetic construct
  misc_feature 1..20: note = HBV-targeting guide sequence portion
  source 1..20: mol_type = other RNA
aatgtttgctccagaccggc

SEQ ID NO: 421 - RNA, 20 nt, synthetic construct
  misc_feature 1..20: note = HBV-targeting guide sequence portion
  source 1..20: mol_type = other RNA
aattaagagaataaccccat

SEQ ID NO: 422 - RNA, 20 nt, synthetic construct
  misc_feature 1..20: note = HBV-targeting guide sequence portion
  source 1..20: mol_type = other RNA
aattagaggacagacgggaa

SEQ ID NO: 423 - RNA, 20 nt, synthetic construct
  misc_feature 1..20: note = HBV-targeting guide sequence portion
  source 1..20: mol_type = other RNA
aattagtacccacccaggta

SEQ ID NO: 424 - RNA, 20 nt, synthetic construct
  misc_feature 1..20: note = HBV-targeting guide sequence portion
  source 1..20: mol_type = other RNA
aattcaccaaatacttgccc

SEQ ID NO: 425 - RNA, 20 nt, synthetic construct
  misc_feature 1..20: note = HBV-targeting guide sequence portion
  source 1..20: mol_type = other RNA
aattccaggatcatcaacca

SEQ ID NO: 426 - RNA, 20 nt, synthetic construct
  misc_feature 1..20: note = HBV-targeting guide sequence portion
  source 1..20: mol_type = other RNA
aattcctatgggagtgggcc

SEQ ID NO: 427 - RNA, 20 nt, synthetic construct
  misc_feature 1..20: note = HBV-targeting guide sequence portion
  source 1..20: mol_type = other RNA
aattcgcagtccccaacctc

SEQ ID NO: 428 - RNA, 20 nt, synthetic construct
  misc_feature 1..20: note = HBV-targeting guide sequence portion
  source 1..20: mol_type = other RNA
aattcgttgacacactttcc

SEQ ID NO: 429 - RNA, 20 nt, synthetic construct
  misc_feature 1..20: note = HBV-targeting guide sequence portion
  source 1..20: mol_type = other RNA
aattcttgcccaaggtctta

SEQ ID NO: 430 - RNA, 20 nt, synthetic construct
  misc_feature 1..20: note = HBV-targeting guide sequence portion
  source 1..20: mol_type = other RNA
aattctttatatgggtcaat

SEQ ID NO: 431 - RNA, 20 nt, synthetic construct
  misc_feature 1..20: note = HBV-targeting guide sequence portion
  source 1..20: mol_type = other RNA
aattctttgctggggagaac

SEQ ID NO: 432 - RNA, 20 nt, synthetic construct
  misc_feature 1..20: note = HBV-targeting guide sequence portion
  source 1..20: mol_type = other RNA
aattgagagaagtccaccac

SEQ ID NO: 433 - RNA, 20 nt, synthetic construct
  misc_feature 1..20: note = HBV-targeting guide sequence portion
  source 1..20: mol_type = other RNA
aattgattatgcctgctagg

SEQ ID NO: 434 - RNA, 20 nt, synthetic construct
  misc_feature 1..20: note = HBV-targeting guide sequence portion
  source 1..20: mol_type = other RNA
aattgcttgcctgagtgcag

SEQ ID NO: 435 - RNA, 20 nt, synthetic construct
  misc_feature 1..20: note = HBV-targeting guide sequence portion
  source 1..20: mol_type = other RNA
aattggtaacagcggtataa

SEQ ID NO: 436 - RNA, 20 nt, synthetic construct
  misc_feature 1..20: note = HBV-targeting guide sequence portion
  source 1..20: mol_type = other RNA
aattggtctgcgcaccagca

SEQ ID NO: 437 - RNA, 20 nt, synthetic construct
  misc_feature 1..20: note = HBV-targeting guide sequence portion
  source 1..20: mol_type = other RNA
aattggtgggcgttcacggt

SEQ ID NO: 438 - RNA, 20 nt, synthetic construct
  misc_feature 1..20: note = HBV-targeting guide sequence portion
  source 1..20: mol_type = other RNA
aattgtgggtcttctgggtt

SEQ ID NO: 439 - RNA, 20 nt, synthetic construct
  misc_feature 1..20: note = HBV-targeting guide sequence portion
  source 1..20: mol_type = other RNA
aatttagaagatcaagcatc

SEQ ID NO: 440 - RNA, 20 nt, synthetic construct
  misc_feature 1..20: note = HBV-targeting guide sequence portion
  source 1..20: mol_type = other RNA
aatttaggataaaacctagc

SEQ ID NO: 441 - RNA, 20 nt, synthetic construct
  misc_feature 1..20: note = HBV-targeting guide sequence portion
  source 1..20: mol_type = other RNA
aatttatgcctacagcctcc

SEQ ID NO: 442 - RNA, 20 nt, synthetic construct
  misc_feature 1..20: note = HBV-targeting guide sequence portion
  source 1..20: mol_type = other RNA
aatttcaaccgtcttttctc

SEQ ID NO: 443 - RNA, 20 nt, synthetic construct
  misc_feature 1..20: note = HBV-targeting guide sequence portion
  source 1..20: mol_type = other RNA
aatttcatgggctatgtcat

SEQ ID NO: 444 - RNA, 20 nt, synthetic construct
  misc_feature 1..20: note = HBV-targeting guide sequence portion
  source 1..20: mol_type = other RNA
aatttcccaccttatgagtc

SEQ ID NO: 445 - RNA, 20 nt, synthetic construct
  misc_feature 1..20: note = HBV-targeting guide sequence portion
  source 1..20: mol_type = other RNA
aatttggagctactgtggag

SEQ ID NO: 446 - RNA, 20 nt, synthetic construct
  misc_feature 1..20: note = HBV-targeting guide sequence portion
  source 1..20: mol_type = other RNA
aattttacggggctttattc

SEQ ID NO: 447 - RNA, 20 nt, synthetic construct
  misc_feature 1..20: note = HBV-targeting guide sequence portion
  source 1..20: mol_type = other RNA
aattttccgaaagcccagga

SEQ ID NO: 448 - RNA, 20 nt, synthetic construct
  misc_feature 1..20: note = HBV-targeting guide sequence portion
  source 1..20: mol_type = other RNA
aattttctagggggaactac

SEQ ID NO: 449 - RNA, 20 nt, synthetic construct
  misc_feature 1..20: note = HBV-targeting guide sequence portion
  source 1..20: mol_type = other RNA
aattttcttttgtctttggg

SEQ ID NO: 450 - RNA, 20 nt, synthetic construct
  misc_feature 1..20: note = HBV-targeting guide sequence portion
  source 1..20: mol_type = other RNA
aattttggccaagacacacg

SEQ ID NO: 451 - RNA, 20 nt, synthetic construct
  misc_feature 1..20: note = HBV-targeting guide sequence portion
  source 1..20: mol_type = other RNA
acaaaacaaagagatggggt

SEQ ID NO: 452 - RNA, 20 nt, synthetic construct
  misc_feature 1..20: note = HBV-targeting guide sequence portion
  source 1..20: mol_type = other RNA
acaaaaccttcggatggaaa

SEQ ID NO: 453 - RNA, 20 nt, synthetic construct
  misc_feature 1..20: note = HBV-targeting guide sequence portion
  source 1..20: mol_type = other RNA
acaaaagaaaattggtaaca

SEQ ID NO: 454 - RNA, 20 nt, synthetic construct
  misc_feature 1..20: note = HBV-targeting guide sequence portion
  source 1..20: mol_type = other RNA
acaaaatcaaagaatgtttc

SEQ ID NO: 455 - RNA, 20 nt, synthetic construct
  misc_feature 1..20: note = HBV-targeting guide sequence portion
  source 1..20: mol_type = other RNA
acaaaatcacatcatacaca

SEQ ID NO: 456 - RNA, 20 nt, synthetic construct
  misc_feature 1..20: note = HBV-targeting guide sequence portion
  source 1..20: mol_type = other RNA
acaaacagtctttgaagtat

SEQ ID NO: 457 - RNA, 20 nt, synthetic construct
  misc_feature 1..20: note = HBV-targeting guide sequence portion
  source 1..20: mol_type = other RNA
acaaactgttcacatttttt

SEQ ID NO: 458 - RNA, 20 nt, synthetic construct
  misc_feature 1..20: note = HBV-targeting guide sequence portion
  source 1..20: mol_type = other RNA
acaaagagatggggttattc

SEQ ID NO: 459 - RNA, 20 nt, synthetic construct
  misc_feature 1..20: note = HBV-targeting guide sequence portion
  source 1..20: mol_type = other RNA
acaaagatcattaatctaat

SEQ ID NO: 460 - RNA, 20 nt, synthetic construct
  misc_feature 1..20: note = HBV-targeting guide sequence portion
  source 1..20: mol_type = other RNA
acaaaggacgtcccgcgcag

SEQ ID NO: 461 - RNA, 20 nt, synthetic construct
  misc_feature 1..20: note = HBV-targeting guide sequence portion
  source 1..20: mol_type = other RNA
acaaatggcactagtaaact

SEQ ID NO: 462 - RNA, 20 nt, synthetic construct
  misc_feature 1..20: note = HBV-targeting guide sequence portion
  source 1..20: mol_type = other RNA
acaacacaagtctccggaag

SEQ ID NO: 463 - RNA, 20 nt, synthetic construct
  misc_feature 1..20: note = HBV-targeting guide sequence portion
  source 1..20: mol_type = other RNA
acaacagagttgtcagtccc

SEQ ID NO: 464 - RNA, 20 nt, synthetic construct
  misc_feature 1..20: note = HBV-targeting guide sequence portion
  source 1..20: mol_type = other RNA
acaaccttccaccaaactct

SEQ ID NO: 465 - RNA, 20 nt, synthetic construct
  misc_feature 1..20: note = HBV-targeting guide sequence portion
  source 1..20: mol_type = other RNA
acaactattgtggtttcaca

SEQ ID NO: 466 - RNA, 20 nt, synthetic construct
  misc_feature 1..20: note = HBV-targeting guide sequence portion
  source 1..20: mol_type = other RNA
acaactctgttgtcctctcc

SEQ ID NO: 467 - RNA, 20 nt, synthetic construct
  misc_feature 1..20: note = HBV-targeting guide sequence portion
  source 1..20: mol_type = other RNA
acaagaaatgtgaaaccaca

SEQ ID NO: 468 - RNA, 20 nt, synthetic construct
  misc_feature 1..20: note = HBV-targeting guide sequence portion
  source 1..20: mol_type = other RNA
acaagaagatgaggcatagc

SEQ ID NO: 469 - RNA, 20 nt, synthetic construct
  misc_feature 1..20: note = HBV-targeting guide sequence portion
  source 1..20: mol_type = other RNA
acaagaatcctcacaatacc

SEQ ID NO: 470 - RNA, 20 nt, synthetic construct
  misc_feature 1..20: note = HBV-targeting guide sequence portion
  source 1..20: mol_type = other RNA
acaagagatgattaggcaga

SEQ ID NO: 471 - RNA, 20 nt, synthetic construct
  misc_feature 1..20: note = HBV-targeting guide sequence portion
  source 1..20: mol_type = other RNA
acaagagctacagcatgggg

SEQ ID NO: 472 - RNA, 20 nt, synthetic construct
  misc_feature 1..20: note = HBV-targeting guide sequence portion
  source 1..20: mol_type = other RNA
acaagcggctaggagttccg

SEQ ID NO: 473 - RNA, 20 nt, synthetic construct
  misc_feature 1..20: note = HBV-targeting guide sequence portion
  source 1..20: mol_type = other RNA
acaaggaaaaccccgcctgt

SEQ ID NO: 474 - RNA, 20 nt, synthetic construct
  misc_feature 1..20: note = HBV-targeting guide sequence portion
  source 1..20: mol_type = other RNA
acaaggatccctggccagac

SEQ ID NO: 475 - RNA, 20 nt, synthetic construct
  misc_feature 1..20: note = HBV-targeting guide sequence portion
  source 1..20: mol_type = other RNA
acaaggcctttctgtgtaaa

SEQ ID NO: 476 - RNA, 20 nt, synthetic construct
  misc_feature 1..20: note = HBV-targeting guide sequence portion
  source 1..20: mol_type = other RNA
acaagggcattaaagcagga

SEQ ID NO: 477 - RNA, 20 nt, synthetic construct
  misc_feature 1..20: note = HBV-targeting guide sequence portion
  source 1..20: mol_type = other RNA
acaaggtaggagctggagca

SEQ ID NO: 478 - RNA, 20 nt, synthetic construct
  misc_feature 1..20: note = HBV-targeting guide sequence portion
  source 1..20: mol_type = other RNA
acaagtctccggaagtgttg

SEQ ID NO: 479 - RNA, 20 nt, synthetic construct
  misc_feature 1..20: note = HBV-targeting guide sequence portion
  source 1..20: mol_type = other RNA
acaagttggaggacaggagg

SEQ ID NO: 480 - RNA, 20 nt, synthetic construct
  misc_feature 1..20: note = HBV-targeting guide sequence portion
  source 1..20: mol_type = other RNA
acaataccgcagagtctaga

SEQ ID NO: 481 - RNA, 20 nt, synthetic construct
  misc_feature 1..20: note = HBV-targeting guide sequence portion
  source 1..20: mol_type = other RNA
acaatacctgaacctttacc

SEQ ID NO: 482 - RNA, 20 nt, synthetic construct
  misc_feature 1..20: note = HBV-targeting guide sequence portion
  source 1..20: mol_type = other RNA
acaatagttgtctgaacttt

SEQ ID NO: 483 - RNA, 20 nt, synthetic construct
  misc_feature 1..20: note = HBV-targeting guide sequence portion
  source 1..20: mol_type = other RNA
acaatcaatgacatagccca

SEQ ID NO: 484 - RNA, 20 nt, synthetic construct
  misc_feature 1..20: note = HBV-targeting guide sequence portion
  source 1..20: mol_type = other RNA
acaatccagattgggacttc

SEQ ID NO: 485 - RNA, 20 nt, synthetic construct
  misc_feature 1..20: note = HBV-targeting guide sequence portion
  source 1..20: mol_type = other RNA
acaatgctcaggagactcca

SEQ ID NO: 486 - RNA, 20 nt, synthetic construct
  misc_feature 1..20: note = HBV-targeting guide sequence portion
  source 1..20: mol_type = other RNA
acaatgtggttatcctgctt

SEQ ID NO: 487 - RNA, 20 nt, synthetic construct
  misc_feature 1..20: note = HBV-targeting guide sequence portion
  source 1..20: mol_type = other RNA
acaattcgttgacacacttt

SEQ ID NO: 488 - RNA, 20 nt, synthetic construct
  misc_feature 1..20: note = HBV-targeting guide sequence portion
  source 1..20: mol_type = other RNA
acacaaaatcaaagaatgtt

SEQ ID NO: 489 - RNA, 20 nt, synthetic construct
  misc_feature 1..20: note = HBV-targeting guide sequence portion
  source 1..20: mol_type = other RNA
acacaagtctccggaagtgt

SEQ ID NO: 490 - RNA, 20 nt, synthetic construct
  misc_feature 1..20: note = HBV-targeting guide sequence portion
  source 1..20: mol_type = other RNA
acacaatgtggttatcctgc

SEQ ID NO: 491 - RNA, 20 nt, synthetic construct
  misc_feature 1..20: note = HBV-targeting guide sequence portion
  source 1..20: mol_type = other RNA
acacacggtagttcccccta

SEQ ID NO: 492 - RNA, 20 nt, synthetic construct
  misc_feature 1..20: note = HBV-targeting guide sequence portion
  source 1..20: mol_type = other RNA
acacactctatggaaggcgg

SEQ ID NO: 493 - RNA, 20 nt, synthetic construct
  misc_feature 1..20: note = HBV-targeting guide sequence portion
  source 1..20: mol_type = other RNA
acacactttccaatcaatag

SEQ ID NO: 494 - RNA, 20 nt, synthetic construct
  misc_feature 1..20: note = HBV-targeting guide sequence portion
  source 1..20: mol_type = other RNA
acacagaaaggccttgtaag

SEQ ID NO: 495 - RNA, 20 nt, synthetic construct
  misc_feature 1..20: note = HBV-targeting guide sequence portion
  source 1..20: mol_type = other RNA
acacatagcgcctcattctg

SEQ ID NO: 496 - RNA, 20 nt, synthetic construct
  misc_feature 1..20: note = HBV-targeting guide sequence portion
  source 1..20: mol_type = other RNA
acacatccagcgataaccag

SEQ ID NO: 497 - RNA, 20 nt, synthetic construct
  misc_feature 1..20: note = HBV-targeting guide sequence portion
  source 1..20: mol_type = other RNA
acaccaaatactctaggacc

SEQ ID NO: 498 - RNA, 20 nt, synthetic construct
  misc_feature 1..20: note = HBV-targeting guide sequence portion
  source 1..20: mol_type = other RNA
acaccaagatattatcaaaa

SEQ ID NO: 499 - RNA, 20 nt, synthetic construct
  misc_feature 1..20: note = HBV-targeting guide sequence portion
  source 1..20: mol_type = other RNA
acacccaaagacaaaagaaa

SEQ ID NO: 500 - RNA, 20 nt, synthetic construct
  misc_feature 1..20: note = HBV-targeting guide sequence portion
  source 1..20: mol_type = other RNA
acacccgccttccatagagt

SEQ ID NO: 501 - RNA, 20 nt, synthetic construct
  misc_feature 1..20: note = HBV-targeting guide sequence portion
  source 1..20: mol_type = other RNA
acaccctcttttcctaatat

SEQ ID NO: 502 - RNA, 20 nt, synthetic construct
  misc_feature 1..20: note = HBV-targeting guide sequence portion
  source 1..20: mol_type = other RNA
acacgagcaggggtcctagg

SEQ ID NO: 503 - RNA, 20 nt, synthetic construct
  misc_feature 1..20: note = HBV-targeting guide sequence portion
  source 1..20: mol_type = other RNA
acacggtagttccccctaga

SEQ ID NO: 504 - RNA, 20 nt, synthetic construct
  misc_feature 1..20: note = HBV-targeting guide sequence portion
  source 1..20: mol_type = other RNA
acacggtccggcagatgaga

SEQ ID NO: 505 - RNA, 20 nt, synthetic construct
  misc_feature 1..20: note = HBV-targeting guide sequence portion
  source 1..20: mol_type = other RNA
acactatttacacactctat

SEQ ID NO: 506 - RNA, 20 nt, synthetic construct
  misc_feature 1..20: note = HBV-targeting guide sequence portion
  source 1..20: mol_type = other RNA
acactcatatgggcctaaag

SEQ ID NO: 507 - RNA, 20 nt, synthetic construct
  misc_feature 1..20: note = HBV-targeting guide sequence portion
  source 1..20: mol_type = other RNA
acactcatcctcaggccatg

SEQ ID NO: 508 - RNA, 20 nt, synthetic construct
  misc_feature 1..20: note = HBV-targeting guide sequence portion
  source 1..20: mol_type = other RNA
acactccaaaagacaccaaa

SEQ ID NO: 509 - RNA, 20 nt, synthetic construct
  misc_feature 1..20: note = HBV-targeting guide sequence portion
  source 1..20: mol_type = other RNA
acactctatggaaggcgggt

SEQ ID NO: 510 - RNA, 20 nt, synthetic construct
  misc_feature 1..20: note = HBV-targeting guide sequence portion
  source 1..20: mol_type = other RNA
acactctcttatataaaaca

SEQ ID NO: 511 - RNA, 20 nt, synthetic construct
  misc_feature 1..20: note = HBV-targeting guide sequence portion
  source 1..20: mol_type = other RNA
acacttccggagacttgtgt

SEQ ID NO: 512 - RNA, 20 nt, synthetic construct
  misc_feature 1..20: note = HBV-targeting guide sequence portion
  source 1..20: mol_type = other RNA
acacttggcacagacctggc

SEQ ID NO: 513 - RNA, 20 nt, synthetic construct
  misc_feature 1..20: note = HBV-targeting guide sequence portion
  source 1..20: mol_type = other RNA
acactttccaatcaataggc

SEQ ID NO: 514 - RNA, 20 nt, synthetic construct
  misc_feature 1..20: note = HBV-targeting guide sequence portion
  source 1..20: mol_type = other RNA
acagaaaggccttgtaagtt

SEQ ID NO: 515 - RNA, 20 nt, synthetic construct
  misc_feature 1..20: note = HBV-targeting guide sequence portion
  source 1..20: mol_type = other RNA
acagaatgaggcgctatgtg

SEQ ID NO: 516 - RNA, 20 nt, synthetic construct
  misc_feature 1..20: note = HBV-targeting guide sequence portion
  source 1..20: mol_type = other RNA
acagacctggccgttgcctg

SEQ ID NO: 517 - RNA, 20 nt, synthetic construct
  misc_feature 1..20: note = HBV-targeting guide sequence portion
  source 1..20: mol_type = other RNA
acagacgggaaacatacctt

SEQ ID NO: 518 - RNA, 20 nt, synthetic construct
  misc_feature 1..20: note = HBV-targeting guide sequence portion
  source 1..20: mol_type = other RNA
acagacggggagtccgcgta

SEQ ID NO: 519 - RNA, 20 nt, synthetic construct
  misc_feature 1..20: note = HBV-targeting guide sequence portion
  source 1..20: mol_type = other RNA
acagacttggcccccaatac

SEQ ID NO: 520 - RNA, 20 nt, synthetic construct
  misc_feature 1..20: note = HBV-targeting guide sequence portion
  source 1..20: mol_type = other RNA
acagagctgcggcggtatct

SEQ ID NO: 521 - RNA, 20 nt, synthetic construct
  misc_feature 1..20: note = HBV-targeting guide sequence portion
  source 1..20: mol_type = other RNA
acagagttgtcagtcccgag

SEQ ID NO: 522 - RNA, 20 nt, synthetic construct
  misc_feature 1..20: note = HBV-targeting guide sequence portion
  source 1..20: mol_type = other RNA
acagcaacaggagggataca

SEQ ID NO: 523 - RNA, 20 nt, synthetic construct
  misc_feature 1..20: note = HBV-targeting guide sequence portion
  source 1..20: mol_type = other RNA
acagcatcttgagtcccttt

SEQ ID NO: 524 - RNA, 20 nt, synthetic construct
  misc_feature 1..20: note = HBV-targeting guide sequence portion
  source 1..20: mol_type = other RNA
acagcatggggcagaatctt

SEQ ID NO: 525 - RNA, 20 nt, synthetic construct
  misc_feature 1..20: note = HBV-targeting guide sequence portion
  source 1..20: mol_type = other RNA
acagcctagcagccatggga

SEQ ID NO: 526 - RNA, 20 nt, synthetic construct
  misc_feature 1..20: note = HBV-targeting guide sequence portion
  source 1..20: mol_type = other RNA
acagcctcctagtacaaaga

SEQ ID NO: 527 - RNA, 20 nt, synthetic construct
  misc_feature 1..20: note = HBV-targeting guide sequence portion
  source 1..20: mol_type = other RNA
acagcggggtaggctgccgt

SEQ ID NO: 528 - RNA, 20 nt, synthetic construct
  misc_feature 1..20: note = HBV-targeting guide sequence portion
  source 1..20: mol_type = other RNA
acagcggtataaagggactc

SEQ ID NO: 529 - RNA, 20 nt, synthetic construct
  misc_feature 1..20: note = HBV-targeting guide sequence portion
  source 1..20: mol_type = other RNA
acagcttggaggcttgaaca

SEQ ID NO: 530 - RNA, 20 nt, synthetic construct
  misc_feature 1..20: note = HBV-targeting guide sequence portion
  source 1..20: mol_type = other RNA
acaggagggatacatagagg

SEQ ID NO: 531 - RNA, 20 nt, synthetic construct
  misc_feature 1..20: note = HBV-targeting guide sequence portion
  source 1..20: mol_type = other RNA
acaggaggttggtgagtgat

SEQ ID NO: 532 - RNA, 20 nt, synthetic construct
  misc_feature 1..20: note = HBV-targeting guide sequence portion
  source 1..20: mol_type = other RNA
acaggcctattgattggaaa

SEQ ID NO: 533 - RNA, 20 nt, synthetic construct
  misc_feature 1..20: note = HBV-targeting guide sequence portion
  source 1..20: mol_type = other RNA
acaggcctctcactctggga

SEQ ID NO: 534 - RNA, 20 nt, synthetic construct
  misc_feature 1..20: note = HBV-targeting guide sequence portion
  source 1..20: mol_type = other RNA
acaggcggggttttccttgt

SEQ ID NO: 535 - RNA, 20 nt, synthetic construct
  misc_feature 1..20: note = HBV-targeting guide sequence portion
  source 1..20: mol_type = other RNA
acagggccccaagcggcctc

SEQ ID NO: 536 - RNA, 20 nt, synthetic construct
  misc_feature 1..20: note = HBV-targeting guide sequence portion
  source 1..20: mol_type = other RNA
acagggtttactgttcctga

SEQ ID NO: 537 - RNA, 20 nt, synthetic construct
  misc_feature 1..20: note = HBV-targeting guide sequence portion
  source 1..20: mol_type = other RNA
acaggtacagtagaagaata

SEQ ID NO: 538 - RNA, 20 nt, synthetic construct
  misc_feature 1..20: note = HBV-targeting guide sequence portion
  source 1..20: mol_type = other RNA
acaggtgcagtttccatccg

SEQ ID NO: 539 - RNA, 20 nt, synthetic construct
  misc_feature 1..20: note = HBV-targeting guide sequence portion
  source 1..20: mol_type = other RNA
acagtaaaccctgttccgac

SEQ ID NO: 540 - RNA, 20 nt, synthetic construct
  misc_feature 1..20: note = HBV-targeting guide sequence portion
  source 1..20: mol_type = other RNA
acagtagaagaataaagccc

SEQ ID NO: 541 - RNA, 20 nt, synthetic construct
  misc_feature 1..20: note = HBV-targeting guide sequence portion
  source 1..20: mol_type = other RNA
acagtagctccaaattcttt

SEQ ID NO: 542 - RNA, 20 nt, synthetic construct
  misc_feature 1..20: note = HBV-targeting guide sequence portion
  source 1..20: mol_type = other RNA
acagtaggacatgaacaaga

SEQ ID NO: 543 - RNA, 20 nt, synthetic construct
  misc_feature 1..20: note = HBV-targeting guide sequence portion
  source 1..20: mol_type = other RNA
acagtctttgaagtatgcct

SEQ ID NO: 544 - RNA, 20 nt, synthetic construct
  misc_feature 1..20: note = HBV-targeting guide sequence portion
  source 1..20: mol_type = other RNA
acagtgggggaaagccctac

SEQ ID NO: 545 - RNA, 20 nt, synthetic construct
  misc_feature 1..20: note = HBV-targeting guide sequence portion
  source 1..20: mol_type = other RNA
acagttaatgagaaaagacg

SEQ ID NO: 546 - RNA, 20 nt, synthetic construct
  misc_feature 1..20: note = HBV-targeting guide sequence portion
  source 1..20: mol_type = other RNA
acagtttgtaggcccgctta

SEQ ID NO: 547 - RNA, 20 nt, synthetic construct
  misc_feature 1..20: note = HBV-targeting guide sequence portion
  source 1..20: mol_type = other RNA
acataactgactactaggtc

SEQ ID NO: 548 - RNA, 20 nt, synthetic construct
  misc_feature 1..20: note = HBV-targeting guide sequence portion
  source 1..20: mol_type = other RNA
acataagaggactcttggac

SEQ ID NO: 549 - RNA, 20 nt, synthetic construct
  misc_feature 1..20: note = HBV-targeting guide sequence portion
  source 1..20: mol_type = other RNA
acataccttgatagtccaga

SEQ ID NO: 550 - RNA, 20 nt, synthetic construct
  misc_feature 1..20: note = HBV-targeting guide sequence portion
  source 1..20: mol_type = other RNA
acatagaggttccttgagca

SEQ ID NO: 551 - RNA, 20 nt, synthetic construct
  misc_feature 1..20: note = HBV-targeting guide sequence portion
  source 1..20: mol_type = other RNA
acatagcccatgaaattaag

SEQ ID NO: 552 - RNA, 20 nt, synthetic construct
  misc_feature 1..20: note = HBV-targeting guide sequence portion
  source 1..20: mol_type = other RNA
acatagcgcctcattctgtg

SEQ ID NO: 553 - RNA, 20 nt, synthetic construct
  misc_feature 1..20: note = HBV-targeting guide sequence portion
  source 1..20: mol_type = other RNA
acatatcgtcaatcttctcg

SEQ ID NO: 554 - RNA, 20 nt, synthetic construct
  misc_feature 1..20: note = HBV-targeting guide sequence portion
  source 1..20: mol_type = other RNA
acatcacatcaggattccta

SEQ ID NO: 555 - RNA, 20 nt, synthetic construct
  misc_feature 1..20: note = HBV-targeting guide sequence portion
  source 1..20: mol_type = other RNA
acatcaggattcctaggacc

SEQ ID NO: 556 - RNA, 20 nt, synthetic construct
  misc_feature 1..20: note = HBV-targeting guide sequence portion
  source 1..20: mol_type = other RNA
acatcatacacaaaatcaaa

SEQ ID NO: 557 - RNA, 20 nt, synthetic construct
  misc_feature 1..20: note = HBV-targeting guide sequence portion
  source 1..20: mol_type = other RNA
acatcatccatataactgaa

SEQ ID NO: 558 - RNA, 20 nt, synthetic construct
  misc_feature 1..20: note = HBV-targeting guide sequence portion
  source 1..20: mol_type = other RNA
acatccagcgataaccagga

SEQ ID NO: 559 - RNA, 20 nt, synthetic construct
  misc_feature 1..20: note = HBV-targeting guide sequence portion
  source 1..20: mol_type = other RNA
acatcgttcccatggctgct

SEQ ID NO: 560 - RNA, 20 nt, synthetic construct
  misc_feature 1..20: note = HBV-targeting guide sequence portion
  source 1..20: mol_type = other RNA
acatctacaccaagatatta

SEQ ID NO: 561 - RNA, 20 nt, synthetic construct
  misc_feature 1..20: note = HBV-targeting guide sequence portion
  source 1..20: mol_type = other RNA
acatctagttaatcattact

SEQ ID NO: 562 - RNA, 20 nt, synthetic construct
  misc_feature 1..20: note = HBV-targeting guide sequence portion
  source 1..20: mol_type = other RNA
acatgaacaagagatgatta

SEQ ID NO: 563 - RNA, 20 nt, synthetic construct
  misc_feature 1..20: note = HBV-targeting guide sequence portion
  source 1..20: mol_type = other RNA
acatgcatacaagggcatta

SEQ ID NO: 564 - RNA, 20 nt, synthetic construct
  misc_feature 1..20: note = HBV-targeting guide sequence portion
  source 1..20: mol_type = other RNA
acatggagaacatcacatca

SEQ ID NO: 565 - RNA, 20 nt, synthetic construct
  misc_feature 1..20: note = HBV-targeting guide sequence portion
  source 1..20: mol_type = other RNA
acattctcgggactgacaac

SEQ ID NO: 566 - RNA, 20 nt, synthetic construct
  misc_feature 1..20: note = HBV-targeting guide sequence portion
  source 1..20: mol_type = other RNA
acattctttgattttgtgta

SEQ ID NO: 567 - RNA, 20 nt, synthetic construct
  misc_feature 1..20: note = HBV-targeting guide sequence portion
  source 1..20: mol_type = other RNA
acattgacccatataaagaa

SEQ ID NO: 568 - RNA, 20 nt, synthetic construct
  misc_feature 1..20: note = HBV-targeting guide sequence portion
  source 1..20: mol_type = other RNA
acattgagatccccgagatt

SEQ ID NO: 569 - RNA, 20 nt, synthetic construct
  misc_feature 1..20: note = HBV-targeting guide sequence portion
  source 1..20: mol_type = other RNA
acattgcagagagtccaaga

SEQ ID NO: 570 - RNA, 20 nt, synthetic construct
  misc_feature 1..20: note = HBV-targeting guide sequence portion
  source 1..20: mol_type = other RNA
acattgtgtaaaaggggcag

SEQ ID NO: 571 - RNA, 20 nt, synthetic construct
  misc_feature 1..20: note = HBV-targeting guide sequence portion
  source 1..20: mol_type = other RNA
acatttaaaccctaacaaaa

SEQ ID NO: 572 - RNA, 20 nt, synthetic construct
  misc_feature 1..20: note = HBV-targeting guide sequence portion
  source 1..20: mol_type = other RNA
acatttcttgtcttactttt

SEQ ID NO: 573 - RNA, 20 nt, synthetic construct
  misc_feature 1..20: note = HBV-targeting guide sequence portion
  source 1..20: mol_type = other RNA
acattttttgataatatctt

SEQ ID NO: 574 - RNA, 20 nt, synthetic construct
  misc_feature 1..20: note = HBV-targeting guide sequence portion
  source 1..20: mol_type = other RNA
accaaactctgcaagatccc

SEQ ID NO: 575 - RNA, 20 nt, synthetic construct
  misc_feature 1..20: note = HBV-targeting guide sequence portion
  source 1..20: mol_type = other RNA
accaaatactctaggaccgt

SEQ ID NO: 576 - RNA, 20 nt, synthetic construct
  misc_feature 1..20: note = HBV-targeting guide sequence portion
  source 1..20: mol_type = other RNA
accaaatacttgcccttgga

SEQ ID NO: 577 - RNA, 20 nt, synthetic construct
  misc_feature 1..20: note = HBV-targeting guide sequence portion
  source 1..20: mol_type = other RNA
accaaatgcccctatcctat

SEQ ID NO: 578 - RNA, 20 nt, synthetic construct
  misc_feature 1..20: note = HBV-targeting guide sequence portion
  source 1..20: mol_type = other RNA
accaacaagaagatgaggca

SEQ ID NO: 579 - RNA, 20 nt, synthetic construct
  misc_feature 1..20: note = HBV-targeting guide sequence portion
  source 1..20: mol_type = other RNA
accaacctcctgtcctccaa

SEQ ID NO: 580 - RNA, 20 nt, synthetic construct
  misc_feature 1..20: note = HBV-targeting guide sequence portion
  source 1..20: mol_type = other RNA
accaagatattatcaaaaaa

SEQ ID NO: 581 - RNA, 20 nt, synthetic construct
  misc_feature 1..20: note = HBV-targeting guide sequence portion
  source 1..20: mol_type = other RNA
accaagccccaaccagtggg

SEQ ID NO: 582 - RNA, 20 nt, synthetic construct
  misc_feature 1..20: note = HBV-targeting guide sequence portion
  source 1..20: mol_type = other RNA
accaatcgccagtcaggacg

SEQ ID NO: 583 - RNA, 20 nt, synthetic construct
  misc_feature 1..20: note = HBV-targeting guide sequence portion
  source 1..20: mol_type = other RNA
accaattcttgcccaaggtc

SEQ ID NO: 584 - RNA, 20 nt, synthetic construct
  misc_feature 1..20: note = HBV-targeting guide sequence portion
  source 1..20: mol_type = other RNA
accaatttatgcctacagcc

SEQ ID NO: 585 - RNA, 20 nt, synthetic construct
  misc_feature 1..20: note = HBV-targeting guide sequence portion
  source 1..20: mol_type = other RNA
accaattttcttttgtcttt

SEQ ID NO: 586 - RNA, 20 nt, synthetic construct
  misc_feature 1..20: note = HBV-targeting guide sequence portion
  source 1..20: mol_type = other RNA
accacaatagttgtctgaac

SEQ ID NO: 587 - RNA, 20 nt, synthetic construct
  misc_feature 1..20: note = HBV-targeting guide sequence portion
  source 1..20: mol_type = other RNA
accacatcatccatataact

SEQ ID NO: 588 - RNA, 20 nt, synthetic construct
  misc_feature 1..20: note = HBV-targeting guide sequence portion
  source 1..20: mol_type = other RNA
accacattgtgtaaaagggg

SEQ ID NO: 589 - RNA, 20 nt, synthetic construct
  misc_feature 1..20: note = HBV-targeting guide sequence portion
  source 1..20: mol_type = other RNA
accaccaaatgcccctatcc

SEQ ID NO: 590 - RNA, 20 nt, synthetic construct
  misc_feature 1..20: note = HBV-targeting guide sequence portion
  source 1..20: mol_type = other RNA
accaccagcacgggaccctg

SEQ ID NO: 591 - RNA, 20 nt, synthetic construct
  misc_feature 1..20: note = HBV-targeting guide sequence portion
  source 1..20: mol_type = other RNA
accaccagttggacccagcc

SEQ ID NO: 592 - RNA, 20 nt, synthetic construct
  misc_feature 1..20: note = HBV-targeting guide sequence portion
  source 1..20: mol_type = other RNA
accaccgtgaacgcccacca

SEQ ID NO: 593 - RNA, 20 nt, synthetic construct
  misc_feature 1..20: note = HBV-targeting guide sequence portion
  source 1..20: mol_type = other RNA
accacgagtctagactctgc

SEQ ID NO: 594 - RNA, 20 nt, synthetic construct
  misc_feature 1..20: note = HBV-targeting guide sequence portion
  source 1..20: mol_type = other RNA
accacggggcgcacctctct

SEQ ID NO: 595 - RNA, 20 nt, synthetic construct
  misc_feature 1..20: note = HBV-targeting guide sequence portion
  source 1..20: mol_type = other RNA
accactgaacaaatggcact

SEQ ID NO: 596 - RNA, 20 nt, synthetic construct
  misc_feature 1..20: note = HBV-targeting guide sequence portion
  source 1..20: mol_type = other RNA
accagcaatcctctgggatt

SEQ ID NO: 597 - RNA, 20 nt, synthetic construct
  misc_feature 1..20: note = HBV-targeting guide sequence portion
  source 1..20: mol_type = other RNA
accagcaccatgcaactttt

SEQ ID NO: 598 - RNA, 20 nt, synthetic construct
  misc_feature 1..20: note = HBV-targeting guide sequence portion
  source 1..20: mol_type = other RNA
accagcacgggaccctgcag

SEQ ID NO: 599 - RNA, 20 nt, synthetic construct
  misc_feature 1..20: note = HBV-targeting guide sequence portion
  source 1..20: mol_type = other RNA
accagcagggagatacaggc

SEQ ID NO: 600 - RNA, 20 nt, synthetic construct
  misc_feature 1..20: note = HBV-targeting guide sequence portion
  source 1..20: mol_type = other RNA
accaggacaagttggaggac

SEQ ID NO: 601 - RNA, 20 nt, synthetic construct
  misc_feature 1..20: note = HBV-targeting guide sequence portion
  source 1..20: mol_type = other RNA
accagtgggggttgcatcag

SEQ ID NO: 602 - RNA, 20 nt, synthetic construct
  misc_feature 1..20: note = HBV-targeting guide sequence portion
  source 1..20: mol_type = other RNA
accagttggacccagccttc

SEQ ID NO: 603 - RNA, 20 nt, synthetic construct
  misc_feature 1..20: note = HBV-targeting guide sequence portion
  source 1..20: mol_type = other RNA
accatactgcactcaggcaa

SEQ ID NO: 604 - RNA, 20 nt, synthetic construct
  misc_feature 1..20: note = HBV-targeting guide sequence portion
  source 1..20: mol_type = other RNA
accatattcttgggaacaag

SEQ ID NO: 605 - RNA, 20 nt, synthetic construct
  misc_feature 1..20: note = HBV-targeting guide sequence portion
  source 1..20: mol_type = other RNA
accatgcaactttttcacct

SEQ ID NO: 606 - RNA, 20 nt, synthetic construct
  misc_feature 1..20: note = HBV-targeting guide sequence portion
  source 1..20: mol_type = other RNA
acccaaagacaaaagaaaat

SEQ ID NO: 607 - RNA, 20 nt, synthetic construct
  misc_feature 1..20: note = HBV-targeting guide sequence portion
  source 1..20: mol_type = other RNA
acccaaggcacagcttggag

SEQ ID NO: 608 - RNA, 20 nt, synthetic construct
  misc_feature 1..20: note = HBV-targeting guide sequence portion
  source 1..20: mol_type = other RNA
acccacaattcgttgacaca

SEQ ID NO: 609 - RNA, 20 nt, synthetic construct
  misc_feature 1..20: note = HBV-targeting guide sequence portion
  source 1..20: mol_type = other RNA
acccacagaatgaggcgcta

SEQ ID NO: 610 - RNA, 20 nt, synthetic construct
  misc_feature 1..20: note = HBV-targeting guide sequence portion
  source 1..20: mol_type = other RNA
acccacccaggtagctagag

SEQ ID NO: 611 - RNA, 20 nt, synthetic construct
  misc_feature 1..20: note = HBV-targeting guide sequence portion
  source 1..20: mol_type = other RNA
acccagaagacccacaattc

SEQ ID NO: 612 - RNA, 20 nt, synthetic construct
  misc_feature 1..20: note = HBV-targeting guide sequence portion
  source 1..20: mol_type = other RNA
acccagccttcagagcaaac

SEQ ID NO: 613 - RNA, 20 nt, synthetic construct
  misc_feature 1..20: note = HBV-targeting guide sequence portion
  source 1..20: mol_type = other RNA
acccaggtagctagagtcat

SEQ ID NO: 614 - RNA, 20 nt, synthetic construct
  misc_feature 1..20: note = HBV-targeting guide sequence portion
  source 1..20: mol_type = other RNA
acccatataaagaatttgga

SEQ ID NO: 615 - RNA, 20 nt, synthetic construct
  misc_feature 1..20: note = HBV-targeting guide sequence portion
  source 1..20: mol_type = other RNA
acccatctcgaggccgcttg

SEQ ID NO: 616 - RNA, 20 nt, synthetic construct
  misc_feature 1..20: note = HBV-targeting guide sequence portion
  source 1..20: mol_type = other RNA
accccaaaaggcctccgtgc

SEQ ID NO: 617 - RNA, 20 nt, synthetic construct
  misc_feature 1..20: note = HBV-targeting guide sequence portion
  source 1..20: mol_type = other RNA
accccaccgcacggaggcct

SEQ ID NO: 618 - RNA, 20 nt, synthetic construct
  misc_feature 1..20: note = HBV-targeting guide sequence portion
  source 1..20: mol_type = other RNA
accccatctctttgttttgt

SEQ ID NO: 619 - RNA, 20 nt, synthetic construct
  misc_feature 1..20: note = HBV-targeting guide sequence portion
  source 1..20: mol_type = other RNA
acccccactggttggggctt

SEQ ID NO: 620 - RNA, 20 nt, synthetic construct
  misc_feature 1..20: note = HBV-targeting guide sequence portion
  source 1..20: mol_type = other RNA
accccgcctgtaacacgagc

SEQ ID NO: 621 - RNA, 20 nt, synthetic construct
  misc_feature 1..20: note = HBV-targeting guide sequence portion
  source 1..20: mol_type = other RNA
accccgctgtctccacctct

SEQ ID NO: 622 - RNA, 20 nt, synthetic construct
  misc_feature 1..20: note = HBV-targeting guide sequence portion
  source 1..20: mol_type = other RNA
accccgttgccaggcaacgg

SEQ ID NO: 623 - RNA, 20 nt, synthetic construct
  misc_feature 1..20: note = HBV-targeting guide sequence portion
  source 1..20: mol_type = other RNA
acccctgctcgtgttacagg

SEQ ID NO: 624 - RNA, 20 nt, synthetic construct
  misc_feature 1..20: note = HBV-targeting guide sequence portion
  source 1..20: mol_type = other RNA
acccgccttccatagagtgt

SEQ ID NO: 625 - RNA, 20 nt, synthetic construct
  misc_feature 1..20: note = HBV-targeting guide sequence portion
  source 1..20: mol_type = other RNA
accctaacaaaacaaagaga

SEQ ID NO: 626 - RNA, 20 nt, synthetic construct
  misc_feature 1..20: note = HBV-targeting guide sequence portion
  source 1..20: mol_type = other RNA
accctagcccgaatgctcca

SEQ ID NO: 627 - RNA, 20 nt, synthetic construct
  misc_feature 1..20: note = HBV-targeting guide sequence portion
  source 1..20: mol_type = other RNA
accctcattggaaaacaccc

SEQ ID NO: 628 - RNA, 20 nt, synthetic construct
  misc_feature 1..20: note = HBV-targeting guide sequence portion
  source 1..20: mol_type = other RNA
accctcttttcctaatatac

SEQ ID NO: 629 - RNA, 20 nt, synthetic construct
  misc_feature 1..20: note = HBV-targeting guide sequence portion
  source 1..20: mol_type = other RNA
accctgcagaacctgcacga

SEQ ID NO: 630 - RNA, 20 nt, synthetic construct
  misc_feature 1..20: note = HBV-targeting guide sequence portion
  source 1..20: mol_type = other RNA
accctgcgctgaacatggag

SEQ ID NO: 631 - RNA, 20 nt, synthetic construct
  misc_feature 1..20: note = HBV-targeting guide sequence portion
  source 1..20: mol_type = other RNA
accctgttccgactactgcc

SEQ ID NO: 632 - RNA, 20 nt, synthetic construct
  misc_feature 1..20: note = HBV-targeting guide sequence portion
  source 1..20: mol_type = other RNA
acccttatccaagggcaagt

SEQ ID NO: 633 - RNA, 20 nt, synthetic construct
  misc_feature 1..20: note = HBV-targeting guide sequence portion
  source 1..20: mol_type = other RNA
accgaccacggggcgcacct

SEQ ID NO: 634 - RNA, 20 nt, synthetic construct
  misc_feature 1..20: note = HBV-targeting guide sequence portion
  source 1..20: mol_type = other RNA
accgaccttgaggcatactt

SEQ ID NO: 635 - RNA, 20 nt, synthetic construct
  misc_feature 1..20: note = HBV-targeting guide sequence portion
  source 1..20: mol_type = other RNA
accgcacggaggccttttgg

SEQ ID NO: 636 - RNA, 20 nt, synthetic construct
  misc_feature 1..20: note = HBV-targeting guide sequence portion
  source 1..20: mol_type = other RNA
accgcagagtctagactcgt

SEQ ID NO: 637 - RNA, 20 nt, synthetic construct
  misc_feature 1..20: note = HBV-targeting guide sequence portion
  source 1..20: mol_type = other RNA
accgccgcagctctgtatcg

SEQ ID NO: 638 - RNA, 20 nt, synthetic construct
  misc_feature 1..20: note = HBV-targeting guide sequence portion
  source 1..20: mol_type = other RNA
accgctgttaccaattttct

SEQ ID NO: 639 - RNA, 20 nt, synthetic construct
  misc_feature 1..20: note = HBV-targeting guide sequence portion
  source 1..20: mol_type = other RNA
accggctgcgagcaaaacaa

SEQ ID NO: 640 - RNA, 20 nt, synthetic construct
  misc_feature 1..20: note = HBV-targeting guide sequence portion
  source 1..20: mol_type = other RNA
accgggagttttctgaaaca

SEQ ID NO: 641 - RNA, 20 nt, synthetic construct
  misc_feature 1..20: note = HBV-targeting guide sequence portion
  source 1..20: mol_type = other RNA
accgtcttttctcattaact

SEQ ID NO: 642 - RNA, 20 nt, synthetic construct
  misc_feature 1..20: note = HBV-targeting guide sequence portion
  source 1..20: mol_type = other RNA
accgtgaacgcccaccaatt

SEQ ID NO: 643 - RNA, 20 nt, synthetic construct
  misc_feature 1..20: note = HBV-targeting guide sequence portion
  source 1..20: mol_type = other RNA
accgtgtgcacttcgcttca

SEQ ID NO: 644 - RNA, 20 nt, synthetic construct
  misc_feature 1..20: note = HBV-targeting guide sequence portion
  source 1..20: mol_type = other RNA
accgtgtgtcttggccaaaa

SEQ ID NO: 645 - RNA, 20 nt, synthetic construct
  misc_feature 1..20: note = HBV-targeting guide sequence portion
  source 1..20: mol_type = other RNA
accgtttctcttccaaaagt

SEQ ID NO: 646 - RNA, 20 nt, synthetic construct
  misc_feature 1..20: note = HBV-targeting guide sequence portion
  source 1..20: mol_type = other RNA
acctagcaggcataatcaat

SEQ ID NO: 647 - RNA, 20 nt, synthetic construct
  misc_feature 1..20: note = HBV-targeting guide sequence portion
  source 1..20: mol_type = other RNA
acctagtagtcagttatgtc

SEQ ID NO: 648 - RNA, 20 nt, synthetic construct
  misc_feature 1..20: note = HBV-targeting guide sequence portion
  source 1..20: mol_type = other RNA
acctcaccatactgcactca

SEQ ID NO: 649 - RNA, 20 nt, synthetic construct
  misc_feature 1..20: note = HBV-targeting guide sequence portion
  source 1..20: mol_type = other RNA
acctccaatcactcaccaac

SEQ ID NO: 650 - RNA, 20 nt, synthetic construct
  misc_feature 1..20: note = HBV-targeting guide sequence portion
  source 1..20: mol_type = other RNA
acctcctgtcctccaacttg

SEQ ID NO: 651 - RNA, 20 nt, synthetic construct
  misc_feature 1..20: note = HBV-targeting guide sequence portion
  source 1..20: mol_type = other RNA
acctctatgtatccctcctg

SEQ ID NO: 652 - RNA, 20 nt, synthetic construct
  misc_feature 1..20: note = HBV-targeting guide sequence portion
  source 1..20: mol_type = other RNA
acctctctttacgcggactc

SEQ ID NO: 653 - RNA, 20 nt, synthetic construct
  misc_feature 1..20: note = HBV-targeting guide sequence portion
  source 1..20: mol_type = other RNA
acctctgagaaacactcatc

SEQ ID NO: 654 - RNA, 20 nt, synthetic construct
  misc_feature 1..20: note = HBV-targeting guide sequence portion
  source 1..20: mol_type = other RNA
acctctgcacgtcgcatgga

SEQ ID NO: 655 - RNA, 20 nt, synthetic construct
  misc_feature 1..20: note = HBV-targeting guide sequence portion
  source 1..20: mol_type = other RNA
acctctgcctaatcatctct

SEQ ID NO: 656 - RNA, 20 nt, synthetic construct
  misc_feature 1..20: note = HBV-targeting guide sequence portion
  source 1..20: mol_type = other RNA
acctgaacctttaccccgtt

SEQ ID NO: 657 - RNA, 20 nt, synthetic construct
  misc_feature 1..20: note = HBV-targeting guide sequence portion
  source 1..20: mol_type = other RNA
acctgcacgactcctgctca

SEQ ID NO: 658 - RNA, 20 nt, synthetic construct
  misc_feature 1..20: note = HBV-targeting guide sequence portion
  source 1..20: mol_type = other RNA
acctgcctcgtcgtctaaca

SEQ ID NO: 659 - RNA, 20 nt, synthetic construct
  misc_feature 1..20: note = HBV-targeting guide sequence portion
  source 1..20: mol_type = other RNA
acctggccgttgcctggcaa

SEQ ID NO: 660 - RNA, 20 nt, synthetic construct
  misc_feature 1..20: note = HBV-targeting guide sequence portion
  source 1..20: mol_type = other RNA
acctgggtgggtactaattt

SEQ ID NO: 661 - RNA, 20 nt, synthetic construct
  misc_feature 1..20: note = HBV-targeting guide sequence portion
  source 1..20: mol_type = other RNA
acctgtattcccatcccatc

SEQ ID NO: 662 - RNA, 20 nt, synthetic construct
  misc_feature 1..20: note = HBV-targeting guide sequence portion
  source 1..20: mol_type = other RNA
acctgtctttaaccctcatt

SEQ ID NO: 663 - RNA, 20 nt, synthetic construct
  misc_feature 1..20: note = HBV-targeting guide sequence portion
  source 1..20: mol_type = other RNA
accttatgagtccaagggat

SEQ ID NO: 664 - RNA, 20 nt, synthetic construct
  misc_feature 1..20: note = HBV-targeting guide sequence portion
  source 1..20: mol_type = other RNA
accttattatccagaacatc

SEQ ID NO: 665 - RNA, 20 nt, synthetic construct
  misc_feature 1..20: note = HBV-targeting guide sequence portion
  source 1..20: mol_type = other RNA
accttccaccaaactctgca

SEQ ID NO: 666 - RNA, 20 nt, synthetic construct
  misc_feature 1..20: note = HBV-targeting guide sequence portion
  source 1..20: mol_type = other RNA
accttcggatggaaactgca

SEQ ID NO: 667 - RNA, 20 nt, synthetic construct
  misc_feature 1..20: note = HBV-targeting guide sequence portion
  source 1..20: mol_type = other RNA
accttgaggcatacttcaaa

SEQ ID NO: 668 - RNA, 20 nt, synthetic construct
  misc_feature 1..20: note = HBV-targeting guide sequence portion
  source 1..20: mol_type = other RNA
accttgatagtccagaagaa

SEQ ID NO: 669 - RNA, 20 nt, synthetic construct
  misc_feature 1..20: note = HBV-targeting guide sequence portion
  source 1..20: mol_type = other RNA
accttgccagcaaatccgcc

SEQ ID NO: 670 - RNA, 20 nt, synthetic construct
  misc_feature 1..20: note = HBV-targeting guide sequence portion
  source 1..20: mol_type = other RNA
accttgggcaagaattggtg

SEQ ID NO: 671 - RNA, 20 nt, synthetic construct
  misc_feature 1..20: note = HBV-targeting guide sequence portion
  source 1..20: mol_type = other RNA
accttgttggcgtctggcca

SEQ ID NO: 672 - RNA, 20 nt, synthetic construct
  misc_feature 1..20: note = HBV-targeting guide sequence portion
  source 1..20: mol_type = other RNA
acctttaccccgttgccagg

SEQ ID NO: 673 - RNA, 20 nt, synthetic construct
  misc_feature 1..20: note = HBV-targeting guide sequence portion
  source 1..20: mol_type = other RNA
acctttccggctcctctgcc

SEQ ID NO: 674 - RNA, 20 nt, synthetic construct
  misc_feature 1..20: note = HBV-targeting guide sequence portion
  source 1..20: mol_type = other RNA
acgaaccactgaacaaatgg

SEQ ID NO: 675 - RNA, 20 nt, synthetic construct
  misc_feature 1..20: note = HBV-targeting guide sequence portion
  source 1..20: mol_type = other RNA
acgaagatctcaatcgccgc

SEQ ID NO: 676 - RNA, 20 nt, synthetic construct
  misc_feature 1..20: note = HBV-targeting guide sequence portion
  source 1..20: mol_type = other RNA
acgaattgtgggtcttctgg

SEQ ID NO: 677 - RNA, 20 nt, synthetic construct
  misc_feature 1..20: note = HBV-targeting guide sequence portion
  source 1..20: mol_type = other RNA
acgacagggccccaagcggc

SEQ ID NO: 678 - RNA, 20 nt, synthetic construct
  misc_feature 1..20: note = HBV-targeting guide sequence portion
  source 1..20: mol_type = other RNA
acgacccatctcgaggccgc

SEQ ID NO: 679 - RNA, 20 nt, synthetic construct
  misc_feature 1..20: note = HBV-targeting guide sequence portion
  source 1..20: mol_type = other RNA
acgaccgaccttgaggcata

SEQ ID NO: 680 - RNA, 20 nt, synthetic construct
  misc_feature 1..20: note = HBV-targeting guide sequence portion
  source 1..20: mol_type = other RNA
acgacgaggcaggtccccta

SEQ ID NO: 681 - RNA, 20 nt, synthetic construct
  misc_feature 1..20: note = HBV-targeting guide sequence portion
  source 1..20: mol_type = other RNA
acgactcctgctcaaggaac

SEQ ID NO: 682 - RNA, 20 nt, synthetic construct
  misc_feature 1..20: note = HBV-targeting guide sequence portion
  source 1..20: mol_type = other RNA
acgagagtaactccacagta

SEQ ID NO: 683 - RNA, 20 nt, synthetic construct
  misc_feature 1..20: note = HBV-targeting guide sequence portion
  source 1..20: mol_type = other RNA
acgagatcttctagataccg

SEQ ID NO: 684 - RNA, 20 nt, synthetic construct
  misc_feature 1..20: note = HBV-targeting guide sequence portion
  source 1..20: mol_type = other RNA
acgagcaggggtcctaggaa

SEQ ID NO: 685 - RNA, 20 nt, synthetic construct
  misc_feature 1..20: note = HBV-targeting guide sequence portion
  source 1..20: mol_type = other RNA
acgaggcaggtcccctagaa

SEQ ID NO: 686 - RNA, 20 nt, synthetic construct
  misc_feature 1..20: note = HBV-targeting guide sequence portion
  source 1..20: mol_type = other RNA
acgagtctagactctgcggt

SEQ ID NO: 687 - RNA, 20 nt, synthetic construct
  misc_feature 1..20: note = HBV-targeting guide sequence portion
  source 1..20: mol_type = other RNA
acgatatgtgagaggcagta

SEQ ID NO: 688 - RNA, 20 nt, synthetic construct
  misc_feature 1..20: note = HBV-targeting guide sequence portion
  source 1..20: mol_type = other RNA
acgatgtatatttgcgggag

SEQ ID NO: 689 - RNA, 20 nt, synthetic construct
  misc_feature 1..20: note = HBV-targeting guide sequence portion
  source 1..20: mol_type = other RNA
acgcatgcgctgatggccta

SEQ ID NO: 690 - RNA, 20 nt, synthetic construct
  misc_feature 1..20: note = HBV-targeting guide sequence portion
  source 1..20: mol_type = other RNA
acgccaacaaggtaggagct

SEQ ID NO: 691 - RNA, 20 nt, synthetic construct
  misc_feature 1..20: note = HBV-targeting guide sequence portion
  source 1..20: mol_type = other RNA
acgcccaccaattcttgccc

SEQ ID NO: 692 - RNA, 20 nt, synthetic construct
  misc_feature 1..20: note = HBV-targeting guide sequence portion
  source 1..20: mol_type = other RNA
acgccgcagacacatccagc

SEQ ID NO: 693 - RNA, 20 nt, synthetic construct
  misc_feature 1..20: note = HBV-targeting guide sequence portion
  source 1..20: mol_type = other RNA
acgcggactccccgtctgtg

SEQ ID NO: 694 - RNA, 20 nt, synthetic construct
  misc_feature 1..20: note = HBV-targeting guide sequence portion
  source 1..20: mol_type = other RNA
acgcggcgattgagatcttc

SEQ ID NO: 695 - RNA, 20 nt, synthetic construct
  misc_feature 1..20: note = HBV-targeting guide sequence portion
  source 1..20: mol_type = other RNA
acggaaggaaagaagtcaga

SEQ ID NO: 696 - RNA, 20 nt, synthetic construct
  misc_feature 1..20: note = HBV-targeting guide sequence portion
  source 1..20: mol_type = other RNA
acggaggccttttggggtgg

SEQ ID NO: 697 - RNA, 20 nt, synthetic construct
  misc_feature 1..20: note = HBV-targeting guide sequence portion
  source 1..20: mol_type = other RNA
acggcagcctaccccgctgt

SEQ ID NO: 698 - RNA, 20 nt, synthetic construct
  misc_feature 1..20: note = HBV-targeting guide sequence portion
  source 1..20: mol_type = other RNA
acggcaggcagagaagagga

SEQ ID NO: 699 - RNA, 20 nt, synthetic construct
  misc_feature 1..20: note = HBV-targeting guide sequence portion
  source 1..20: mol_type = other RNA
acggccaggtctgtgccaag

SEQ ID NO: 700 - RNA, 20 nt, synthetic construct
  misc_feature 1..20: note = HBV-targeting guide sequence portion
  source 1..20: mol_type = other RNA
acgggaaacataccttgata

SEQ ID NO: 701 - RNA, 20 nt, synthetic construct
  misc_feature 1..20: note = HBV-targeting guide sequence portion
  source 1..20: mol_type = other RNA
acgggaccctgcagaacctg

SEQ ID NO: 702 - RNA, 20 nt, synthetic construct
  misc_feature 1..20: note = HBV-targeting guide sequence portion
  source 1..20: mol_type = other RNA
acgggacgtaaacaaaggac

SEQ ID NO: 703 - RNA, 20 nt, synthetic construct
  misc_feature 1..20: note = HBV-targeting guide sequence portion
  source 1..20: mol_type = other RNA
acgggctgaggcccactccc

SEQ ID NO: 704 - RNA, 20 nt, synthetic construct
  misc_feature 1..20: note = HBV-targeting guide sequence portion
  source 1..20: mol_type = other RNA
acggggagtccgcgtaaaga

SEQ ID NO: 705 - RNA, 20 nt, synthetic construct
  misc_feature 1..20: note = HBV-targeting guide sequence portion
  source 1..20: mol_type = other RNA
acggggcgcacctctcttta

SEQ ID NO: 706 - RNA, 20 nt, synthetic construct
  misc_feature 1..20: note = HBV-targeting guide sequence portion
  source 1..20: mol_type = other RNA
acggggctttattcttctac

SEQ ID NO: 707 - RNA, 20 nt, synthetic construct
  misc_feature 1..20: note = HBV-targeting guide sequence portion
  source 1..20: mol_type = other RNA
acggggtaaaggttcaggta

SEQ ID NO: 708 - RNA, 20 nt, synthetic construct
  misc_feature 1..20: note = HBV-targeting guide sequence portion
  source 1..20: mol_type = other RNA
acggtagttccccctagaaa

SEQ ID NO: 709 - RNA, 20 nt, synthetic construct
  misc_feature 1..20: note = HBV-targeting guide sequence portion
  source 1..20: mol_type = other RNA
acggtccggcagatgagaag

SEQ ID NO: 710 - RNA, 20 nt, synthetic construct
  misc_feature 1..20: note = HBV-targeting guide sequence portion
  source 1..20: mol_type = other RNA
acggtcctagagtatttggt

SEQ ID NO: 711 - RNA, 20 nt, synthetic construct
  misc_feature 1..20: note = HBV-targeting guide sequence portion
  source 1..20: mol_type = other RNA
acggtggtctccatgcgacg

SEQ ID NO: 712 - RNA, 20 nt, synthetic construct
  misc_feature 1..20: note = HBV-targeting guide sequence portion
  source 1..20: mol_type = other RNA
acggttgaaattgattatgc

SEQ ID NO: 713 - RNA, 20 nt, synthetic construct
  misc_feature 1..20: note = HBV-targeting guide sequence portion
  source 1..20: mol_type = other RNA
acgtaaacaaaggacgtccc

SEQ ID NO: 714 - RNA, 20 nt, synthetic construct
  misc_feature 1..20: note = HBV-targeting guide sequence portion
  source 1..20: mol_type = other RNA
acgtcccgcgcaggatccag

SEQ ID NO: 715 - RNA, 20 nt, synthetic construct
  misc_feature 1..20: note = HBV-targeting guide sequence portion
  source 1..20: mol_type = other RNA
acgtcccgtcggcgctgaat

SEQ ID NO: 716 - RNA, 20 nt, synthetic construct
  misc_feature 1..20: note = HBV-targeting guide sequence portion
  source 1..20: mol_type = other RNA
acgtcctttgtttacgtccc

SEQ ID NO: 717 - RNA, 20 nt, synthetic construct
  misc_feature 1..20: note = HBV-targeting guide sequence portion
  source 1..20: mol_type = other RNA
acgtcgcatggagaccaccg

SEQ ID NO: 718 - RNA, 20 nt, synthetic construct
  misc_feature 1..20: note = HBV-targeting guide sequence portion
  source 1..20: mol_type = other RNA
acgtgcagaggtgaagcgaa

SEQ ID NO: 719 - RNA, 20 nt, synthetic construct
  misc_feature 1..20: note = HBV-targeting guide sequence portion
  source 1..20: mol_type = other RNA
actaacattgagatccccga

SEQ ID NO: 720 - RNA, 20 nt, synthetic construct
  misc_feature 1..20: note = HBV-targeting guide sequence portion
  source 1..20: mol_type = other RNA
actaatgactctagctacct

SEQ ID NO: 721 - RNA, 20 nt, synthetic construct
  misc_feature 1..20: note = HBV-targeting guide sequence portion
  source 1..20: mol_type = other RNA
actaatttagaagatcaagc

SEQ ID NO: 722 - RNA, 20 nt, synthetic construct
  misc_feature 1..20: note = HBV-targeting guide sequence portion
  source 1..20: mol_type = other RNA
actaccgtgtgtcttggcca

SEQ ID NO: 723 - RNA, 20 nt, synthetic construct
  misc_feature 1..20: note = HBV-targeting guide sequence portion
  source 1..20: mol_type = other RNA
actactaggtccctagatgc

SEQ ID NO: 724 - RNA, 20 nt, synthetic construct
  misc_feature 1..20: note = HBV-targeting guide sequence portion
  source 1..20: mol_type = other RNA
actactgcctctcacatatc

SEQ ID NO: 725 - RNA, 20 nt, synthetic construct
  misc_feature 1..20: note = HBV-targeting guide sequence portion
  source 1..20: mol_type = other RNA
actagacactatttacacac

SEQ ID NO: 726 - RNA, 20 nt, synthetic construct
  misc_feature 1..20: note = HBV-targeting guide sequence portion
  source 1..20: mol_type = other RNA
actagatgttctggataata

SEQ ID NO: 727 - RNA, 20 nt, synthetic construct
  misc_feature 1..20: note = HBV-targeting guide sequence portion
  source 1..20: mol_type = other RNA
actaggaggctgtaggcata

SEQ ID NO: 728 - RNA, 20 nt, synthetic construct
  misc_feature 1..20: note = HBV-targeting guide sequence portion
  source 1..20: mol_type = other RNA
actaggtccctagatgcttg

SEQ ID NO: 729 - RNA, 20 nt, synthetic construct
  misc_feature 1..20: note = HBV-targeting guide sequence portion
  source 1..20: mol_type = other RNA
actagtaaactgagccaaga

SEQ ID NO: 730 - RNA, 20 nt, synthetic construct
  misc_feature 1..20: note = HBV-targeting guide sequence portion
  source 1..20: mol_type = other RNA
actagtgccatttgttcagt

SEQ ID NO: 731 - RNA, 20 nt, synthetic construct
  misc_feature 1..20: note = HBV-targeting guide sequence portion
  source 1..20: mol_type = other RNA
actatcaaggtatgtttccc

SEQ ID NO: 732 - RNA, 20 nt, synthetic construct
  misc_feature 1..20: note = HBV-targeting guide sequence portion
  source 1..20: mol_type = other RNA
actattgtggtttcacattt

SEQ ID NO: 733 - RNA, 20 nt, synthetic construct
  misc_feature 1..20: note = HBV-targeting guide sequence portion
  source 1..20: mol_type = other RNA
actatttacacactctatgg

SEQ ID NO: 734 - RNA, 20 nt, synthetic construct
  misc_feature 1..20: note = HBV-targeting guide sequence portion
  source 1..20: mol_type = other RNA
actcaagatgctgtacagac

SEQ ID NO: 735 - RNA, 20 nt, synthetic construct
  misc_feature 1..20: note = HBV-targeting guide sequence portion
  source 1..20: mol_type = other RNA
actcaccaacctcctgtcct

SEQ ID NO: 736 - RNA, 20 nt, synthetic construct
  misc_feature 1..20: note = HBV-targeting guide sequence portion
  source 1..20: mol_type = other RNA
actcaggcaagcaattcttt

SEQ ID NO: 737 - RNA, 20 nt, synthetic construct
  misc_feature 1..20: note = HBV-targeting guide sequence portion
  source 1..20: mol_type = other RNA
actcataaggtgggaaattt

SEQ ID NO: 738 - RNA, 20 nt, synthetic construct
  misc_feature 1..20: note = HBV-targeting guide sequence portion
  source 1..20: mol_type = other RNA
actcatatgggcctaaagtt

SEQ ID NO: 739 - RNA, 20 nt, synthetic construct
  misc_feature 1..20: note = HBV-targeting guide sequence portion
  source 1..20: mol_type = other RNA
actccaaaagacaccaaata

SEQ ID NO: 740 - RNA, 20 nt, synthetic construct
  misc_feature 1..20: note = HBV-targeting guide sequence portion
  source 1..20: mol_type = other RNA
actccaacaatccagattgg

SEQ ID NO: 741 - RNA, 20 nt, synthetic construct
  misc_feature 1..20: note = HBV-targeting guide sequence portion
  source 1..20: mol_type = other RNA
actccaaggcatcccgatac

SEQ ID NO: 742 - RNA, 20 nt, synthetic construct
  misc_feature 1..20: note = HBV-targeting guide sequence portion
  source 1..20: mol_type = other RNA
actccacaaccttccaccaa

SEQ ID NO: 743 - RNA, 20 nt, synthetic construct
  misc_feature 1..20: note = HBV-targeting guide sequence portion
  source 1..20: mol_type = other RNA
actccacagtagctccaaat

SEQ ID NO: 744 - RNA, 20 nt, synthetic construct
  misc_feature 1..20: note = HBV-targeting guide sequence portion
  source 1..20: mol_type = other RNA
actcccataggaattttccg

SEQ ID NO: 745 - RNA, 20 nt, synthetic construct
  misc_feature 1..20: note = HBV-targeting guide sequence portion
  source 1..20: mol_type = other RNA
actccccgtctgtgccttct

SEQ ID NO: 746 - RNA, 20 nt, synthetic construct
  misc_feature 1..20: note = HBV-targeting guide sequence portion
  source 1..20: mol_type = other RNA
actcccggttaacaggccta

SEQ ID NO: 747 - RNA, 20 nt, synthetic construct
  misc_feature 1..20: note = HBV-targeting guide sequence portion
  source 1..20: mol_type = other RNA
actccctcgcctcgcagacg

SEQ ID NO: 748 - RNA, 20 nt, synthetic construct
  misc_feature 1..20: note = HBV-targeting guide sequence portion
  source 1..20: mol_type = other RNA
actcctagccgcttgttttg

SEQ ID NO: 749 - RNA, 20 nt, synthetic construct
  misc_feature 1..20: note = HBV-targeting guide sequence portion
  source 1..20: mol_type = other RNA
actcctccagcttatagacc

SEQ ID NO: 750 - RNA, 20 nt, synthetic construct
  misc_feature 1..20: note = HBV-targeting guide sequence portion
  source 1..20: mol_type = other RNA
actcctcccagtctttaaac

SEQ ID NO: 751 - RNA, 20 nt, synthetic construct
  misc_feature 1..20: note = HBV-targeting guide sequence portion
  source 1..20: mol_type = other RNA
actcctgctcaaggaacctc

SEQ ID NO: 752 - RNA, 20 nt, synthetic construct
  misc_feature 1..20: note = HBV-targeting guide sequence portion
  source 1..20: mol_type = other RNA
actcgtggtggacttctctc

SEQ ID NO: 753 - RNA, 20 nt, synthetic construct
  misc_feature 1..20: note = HBV-targeting guide sequence portion
  source 1..20: mol_type = other RNA
actctagctacctgggtggg

SEQ ID NO: 754 - RNA, 20 nt, synthetic construct
  misc_feature 1..20: note = HBV-targeting guide sequence portion
  source 1..20: mol_type = other RNA
actctaggaccgtttctctt

SEQ ID NO: 755 - RNA, 20 nt, synthetic construct
  misc_feature 1..20: note = HBV-targeting guide sequence portion
  source 1..20: mol_type = other RNA
actctatggaaggcgggtgt

SEQ ID NO: 756 - RNA, 20 nt, synthetic construct
  misc_feature 1..20: note = HBV-targeting guide sequence portion
  source 1..20: mol_type = other RNA
actctcgtttttgccttctg

SEQ ID NO: 757 - RNA, 20 nt, synthetic construct
  misc_feature 1..20: note = HBV-targeting guide sequence portion
  source 1..20: mol_type = other RNA
actctctgcaatgtcaacga

SEQ ID NO: 758 - RNA, 20 nt, synthetic construct
  misc_feature 1..20: note = HBV-targeting guide sequence portion
  source 1..20: mol_type = other RNA
actctcttatataaaacacc

SEQ ID NO: 759 - RNA, 20 nt, synthetic construct
  misc_feature 1..20: note = HBV-targeting guide sequence portion
  source 1..20: mol_type = other RNA
actctgcaagatcccagagt

SEQ ID NO: 760 - RNA, 20 nt, synthetic construct
  misc_feature 1..20: note = HBV-targeting guide sequence portion
  source 1..20: mol_type = other RNA
actctgcggtattgtgagga

SEQ ID NO: 761 - RNA, 20 nt, synthetic construct
  misc_feature 1..20: note = HBV-targeting guide sequence portion
  source 1..20: mol_type = other RNA
actctgggatcttgcagagt

SEQ ID NO: 762 - RNA, 20 nt, synthetic construct
  misc_feature 1..20: note = HBV-targeting guide sequence portion
  source 1..20: mol_type = other RNA
actctgttgtcctctcccgc

SEQ ID NO: 763 - RNA, 20 nt, synthetic construct
  misc_feature 1..20: note = HBV-targeting guide sequence portion
  source 1..20: mol_type = other RNA
actcttggactctctgcaat

SEQ ID NO: 764 - RNA, 20 nt, synthetic construct
  misc_feature 1..20: note = HBV-targeting guide sequence portion
  source 1..20: mol_type = other RNA
actgaaagccaaacagtggg

SEQ ID NO: 765 - RNA, 20 nt, synthetic construct
  misc_feature 1..20: note = HBV-targeting guide sequence portion
  source 1..20: mol_type = other RNA
actgaacaaatggcactagt

SEQ ID NO: 766 - RNA, 20 nt, synthetic construct
  misc_feature 1..20: note = HBV-targeting guide sequence portion
  source 1..20: mol_type = other RNA
actgacaactctgttgtcct

SEQ ID NO: 767 - RNA, 20 nt, synthetic construct
  misc_feature 1..20: note = HBV-targeting guide sequence portion
  source 1..20: mol_type = other RNA
actgactactaggtccctag

SEQ ID NO: 768 - RNA, 20 nt, synthetic construct
  misc_feature 1..20: note = HBV-targeting guide sequence portion
  source 1..20: mol_type = other RNA
actgagccaagagaaacggg

SEQ ID NO: 769 - RNA, 20 nt, synthetic construct
  misc_feature 1..20: note = HBV-targeting guide sequence portion
  source 1..20: mol_type = other RNA
actgcacctgtattcccatc

SEQ ID NO: 770 - RNA, 20 nt, synthetic construct
  misc_feature 1..20: note = HBV-targeting guide sequence portion
  source 1..20: mol_type = other RNA
actgcactcaggcaagcaat

SEQ ID NO: 771 - RNA, 20 nt, synthetic construct
  misc_feature 1..20: note = HBV-targeting guide sequence portion
  source 1..20: mol_type = other RNA
actgcatggcctgaggatga

SEQ ID NO: 772 - RNA, 20 nt, synthetic construct
  misc_feature 1..20: note = HBV-targeting guide sequence portion
  source 1..20: mol_type = other RNA
actgcctctcacatatcgtc

SEQ ID NO: 773 - RNA, 20 nt, synthetic construct
  misc_feature 1..20: note = HBV-targeting guide sequence portion
  source 1..20: mol_type = other RNA
actgcgaattttggccaaga

SEQ ID NO: 774 - RNA, 20 nt, synthetic construct
  misc_feature 1..20: note = HBV-targeting guide sequence portion
  source 1..20: mol_type = other RNA
actgcggaactcctagccgc

SEQ ID NO: 775 - RNA, 20 nt, synthetic construct
  misc_feature 1..20: note = HBV-targeting guide sequence portion
  source 1..20: mol_type = other RNA
actggagccaccagcaggga

SEQ ID NO: 776 - RNA, 20 nt, synthetic construct
  misc_feature 1..20: note = HBV-targeting guide sequence portion
  source 1..20: mol_type = other RNA
actggatcctgcgcgggacg

SEQ ID NO: 777 - RNA, 20 nt, synthetic construct
  misc_feature 1..20: note = HBV-targeting guide sequence portion
  source 1..20: mol_type = other RNA
actggcgattggtagaggca

SEQ ID NO: 778 - RNA, 20 nt, synthetic construct
  misc_feature 1..20: note = HBV-targeting guide sequence portion
  source 1..20: mol_type = other RNA
actgggaggagttgggggag

SEQ ID NO: 779 - RNA, 20 nt, synthetic construct
  misc_feature 1..20: note = HBV-targeting guide sequence portion
  source 1..20: mol_type = other RNA
actggtggtcgggaaagaat

SEQ ID NO: 780 - RNA, 20 nt, synthetic construct
  misc_feature 1..20: note = HBV-targeting guide sequence portion
  source 1..20: mol_type = other RNA
actggttggggcttggtcat

SEQ ID NO: 781 - RNA, 20 nt, synthetic construct
  misc_feature 1..20: note = HBV-targeting guide sequence portion
  source 1..20: mol_type = other RNA
actgtaagcgggcctacaaa

SEQ ID NO: 782 - RNA, 20 nt, synthetic construct
  misc_feature 1..20: note = HBV-targeting guide sequence portion
  source 1..20: mol_type = other RNA
actgtacctgtctttaaccc

SEQ ID NO: 783 - RNA, 20 nt, synthetic construct
  misc_feature 1..20: note = HBV-targeting guide sequence portion
  source 1..20: mol_type = other RNA
actgtggagttactctcgtt

SEQ ID NO: 784 - RNA, 20 nt, synthetic construct
  misc_feature 1..20: note = HBV-targeting guide sequence portion
  source 1..20: mol_type = other RNA
actgttcaagcctccaagct

SEQ ID NO: 785 - RNA, 20 nt, synthetic construct
  misc_feature 1..20: note = HBV-targeting guide sequence portion
  source 1..20: mol_type = other RNA
actgttcacattttttgata

SEQ ID NO: 786 - RNA, 20 nt, synthetic construct
  misc_feature 1..20: note = HBV-targeting guide sequence portion
  source 1..20: mol_type = other RNA
actgttcctgaactggagcc

SEQ ID NO: 787 - RNA, 20 nt, synthetic construct
  misc_feature 1..20: note = HBV-targeting guide sequence portion
  source 1..20: mol_type = other RNA
actgtttggctttcagttat

SEQ ID NO: 788 - RNA, 20 nt, synthetic construct
  misc_feature 1..20: note = HBV-targeting guide sequence portion
  source 1..20: mol_type = other RNA
actgtttgtttaaagactgg

SEQ ID NO: 789 - RNA, 20 nt, synthetic construct
  misc_feature 1..20: note = HBV-targeting guide sequence portion
  source 1..20: mol_type = other RNA
acttacaaggcctttctgtg

SEQ ID NO: 790 - RNA, 20 nt, synthetic construct
  misc_feature 1..20: note = HBV-targeting guide sequence portion
  source 1..20: mol_type = other RNA
acttcaaagactgtttgttt

SEQ ID NO: 791 - RNA, 20 nt, synthetic construct
  misc_feature 1..20: note = HBV-targeting guide sequence portion
  source 1..20: mol_type = other RNA
acttcaatcccaacaaggat

SEQ ID NO: 792 - RNA, 20 nt, synthetic construct
  misc_feature 1..20: note = HBV-targeting guide sequence portion
  source 1..20: mol_type = other RNA
acttccaaactagacactat

SEQ ID NO: 793 - RNA, 20 nt, synthetic construct
  misc_feature 1..20: note = HBV-targeting guide sequence portion
  source 1..20: mol_type = other RNA
acttccggagacttgtgttg

SEQ ID NO: 794 - RNA, 20 nt, synthetic construct
  misc_feature 1..20: note = HBV-targeting guide sequence portion
  source 1..20: mol_type = other RNA
acttcgcttcacctctgcac

SEQ ID NO: 795 - RNA, 20 nt, synthetic construct
  misc_feature 1..20: note = HBV-targeting guide sequence portion
  source 1..20: mol_type = other RNA
acttctctcaattttctagg

SEQ ID NO: 796 - RNA, 20 nt, synthetic construct
  misc_feature 1..20: note = HBV-targeting guide sequence portion
  source 1..20: mol_type = other RNA
acttctttccttccgtacga

SEQ ID NO: 797 - RNA, 20 nt, synthetic construct
  misc_feature 1..20: note = HBV-targeting guide sequence portion
  source 1..20: mol_type = other RNA
acttgcccttggataagggt

SEQ ID NO: 798 - RNA, 20 nt, synthetic construct
  misc_feature 1..20: note = HBV-targeting guide sequence portion
  source 1..20: mol_type = other RNA
acttggcacagacctggccg

SEQ ID NO: 799 - RNA, 20 nt, synthetic construct
  misc_feature 1..20: note = HBV-targeting guide sequence portion
  source 1..20: mol_type = other RNA
acttggcccccaataccaca

SEQ ID NO: 800 - RNA, 20 nt, synthetic construct
  misc_feature 1..20: note = HBV-targeting guide sequence portion
  source 1..20: mol_type = other RNA
acttgtcctggttatcgctg

SEQ ID NO: 801 - RNA, 20 nt, synthetic construct
  misc_feature 1..20: note = HBV-targeting guide sequence portion
  source 1..20: mol_type = other RNA
acttgtgttgttagacgacg

SEQ ID NO: 802 - RNA, 20 nt, synthetic construct
  misc_feature 1..20: note = HBV-targeting guide sequence portion
  source 1..20: mol_type = other RNA
actttaggcccatatgagtg

SEQ ID NO: 803 - RNA, 20 nt, synthetic construct
  misc_feature 1..20: note = HBV-targeting guide sequence portion
  source 1..20: mol_type = other RNA
actttccaatcaataggcct

SEQ ID NO: 804 - RNA, 20 nt, synthetic construct
  misc_feature 1..20: note = HBV-targeting guide sequence portion
  source 1..20: mol_type = other RNA
acttttggaagagaaacggt

SEQ ID NO: 805 - RNA, 20 nt, synthetic construct
  misc_feature 1..20: note = HBV-targeting guide sequence portion
  source 1..20: mol_type = other RNA
actttttcacctctgcctaa

SEQ ID NO: 806 - RNA, 20 nt, synthetic construct
  misc_feature 1..20: note = HBV-targeting guide sequence portion
  source 1..20: mol_type = other RNA
actttttcgccaacttacaa

SEQ ID NO: 807 - RNA, 20 nt, synthetic construct
  misc_feature 1..20: note = HBV-targeting guide sequence portion
  source 1..20: mol_type = other RNA
agaaaactcccggttaacag

SEQ ID NO: 808 - RNA, 20 nt, synthetic construct
  misc_feature 1..20: note = HBV-targeting guide sequence portion
  source 1..20: mol_type = other RNA
agaaaagacggttgaaattg

SEQ ID NO: 809 - RNA, 20 nt, synthetic construct
  misc_feature 1..20: note = HBV-targeting guide sequence portion
  source 1..20: mol_type = other RNA
agaaaattgagagaagtcca

SEQ ID NO: 810 - RNA, 20 nt, synthetic construct
  misc_feature 1..20: note = HBV-targeting guide sequence portion
  source 1..20: mol_type = other RNA
agaaaattggtaacagcggt

SEQ ID NO: 811 - RNA, 20 nt, synthetic construct
  misc_feature 1..20: note = HBV-targeting guide sequence portion
  source 1..20: mol_type = other RNA
agaaacactcatcctcaggc

SEQ ID NO: 812 - RNA, 20 nt, synthetic construct
  misc_feature 1..20: note = HBV-targeting guide sequence portion
  source 1..20: mol_type = other RNA
agaaacgggctgaggcccac

SEQ ID NO: 813 - RNA, 20 nt, synthetic construct
  misc_feature 1..20: note = HBV-targeting guide sequence portion
  source 1..20: mol_type = other RNA
agaaacggtcctagagtatt

SEQ ID NO: 814 - RNA, 20 nt, synthetic construct
  misc_feature 1..20: note = HBV-targeting guide sequence portion
  source 1..20: mol_type = other RNA
agaaaggccttgtaagttgg

SEQ ID NO: 815 - RNA, 20 nt, synthetic construct
  misc_feature 1..20: note = HBV-targeting guide sequence portion
  source 1..20: mol_type = other RNA
agaaatgtgaaaccacaata

SEQ ID NO: 816 - RNA, 20 nt, synthetic construct
  misc_feature 1..20: note = HBV-targeting guide sequence portion
  source 1..20: mol_type = other RNA
agaacatcacatcaggattc

SEQ ID NO: 817 - RNA, 20 nt, synthetic construct
  misc_feature 1..20: note = HBV-targeting guide sequence portion
  source 1..20: mol_type = other RNA
agaacatctagttaatcatt

SEQ ID NO: 818 - RNA, 20 nt, synthetic construct
  misc_feature 1..20: note = HBV-targeting guide sequence portion
  source 1..20: mol_type = other RNA
agaaccaacaagaagatgag

SEQ ID NO: 819 - RNA, 20 nt, synthetic construct
  misc_feature 1..20: note = HBV-targeting guide sequence portion
  source 1..20: mol_type = other RNA
agaacctgcacgactcctgc

SEQ ID NO: 820 - RNA, 20 nt, synthetic construct
  misc_feature 1..20: note = HBV-targeting guide sequence portion
  source 1..20: mol_type = other RNA
agaactaatgactctagcta

SEQ ID NO: 821 - RNA, 20 nt, synthetic construct
  misc_feature 1..20: note = HBV-targeting guide sequence portion
  source 1..20: mol_type = other RNA
agaactccctcgcctcgcag

SEQ ID NO: 822 - RNA, 20 nt, synthetic construct
  misc_feature 1..20: note = HBV-targeting guide sequence portion
  source 1..20: mol_type = other RNA
agaagaaccaacaagaagat

SEQ ID NO: 823 - RNA, 20 nt, synthetic construct
  misc_feature 1..20: note = HBV-targeting guide sequence portion
  source 1..20: mol_type = other RNA
agaagaactccctcgcctcg

SEQ ID NO: 824 - RNA, 20 nt, synthetic construct
  misc_feature 1..20: note = HBV-targeting guide sequence portion
  source 1..20: mol_type = other RNA
agaagaagaactccctcgcc

SEQ ID NO: 825 - RNA, 20 nt, synthetic construct
  misc_feature 1..20: note = HBV-targeting guide sequence portion
  source 1..20: mol_type = other RNA
agaagaataaagccccgtaa

SEQ ID NO: 826 - RNA, 20 nt, synthetic construct
  misc_feature 1..20: note = HBV-targeting guide sequence portion
  source 1..20: mol_type = other RNA
agaagacccacaattcgttg

SEQ ID NO: 827 - RNA, 20 nt, synthetic construct
  misc_feature 1..20: note = HBV-targeting guide sequence portion
  source 1..20: mol_type = other RNA
agaagaggacgacagggccc

SEQ ID NO: 828 - RNA, 20 nt, synthetic construct
  misc_feature 1..20: note = HBV-targeting guide sequence portion
  source 1..20: mol_type = other RNA
agaagatcaagcatctaggg

SEQ ID NO: 829 - RNA, 20 nt, synthetic construct
  misc_feature 1..20: note = HBV-targeting guide sequence portion
  source 1..20: mol_type = other RNA
agaagatctcaatctcgggg

SEQ ID NO: 830 - RNA, 20 nt, synthetic construct
  misc_feature 1..20: note = HBV-targeting guide sequence portion
  source 1..20: mol_type = other RNA
agaagatctcgtacggaagg

SEQ ID NO: 831 - RNA, 20 nt, synthetic construct
  misc_feature 1..20: note = HBV-targeting guide sequence portion
  source 1..20: mol_type = other RNA
agaagatgaggcatagcagc

SEQ ID NO: 832 - RNA, 20 nt, synthetic construct
  misc_feature 1..20: note = HBV-targeting guide sequence portion
  source 1..20: mol_type = other RNA
agaagattgacgatatgtga

SEQ ID NO: 833 - RNA, 20 nt, synthetic construct
  misc_feature 1..20: note = HBV-targeting guide sequence portion
  source 1..20: mol_type = other RNA
agaaggcaaaaacgagagta

SEQ ID NO: 834 - RNA, 20 nt, synthetic construct
  misc_feature 1..20: note = HBV-targeting guide sequence portion
  source 1..20: mol_type = other RNA
agaaggcacagacggggagt

SEQ ID NO: 835 - RNA, 20 nt, synthetic construct
  misc_feature 1..20: note = HBV-targeting guide sequence portion
  source 1..20: mol_type = other RNA
agaagtcagaaggcaaaaac

SEQ ID NO: 836 - RNA, 20 nt, synthetic construct
  misc_feature 1..20: note = HBV-targeting guide sequence portion
  source 1..20: mol_type = other RNA
agaagtccaccacgagtcta

SEQ ID NO: 837 - RNA, 20 nt, synthetic construct
  misc_feature 1..20: note = HBV-targeting guide sequence portion
  source 1..20: mol_type = other RNA
agaataaagccccgtaaaat

SEQ ID NO: 838 - RNA, 20 nt, synthetic construct
  misc_feature 1..20: note = HBV-targeting guide sequence portion
  source 1..20: mol_type = other RNA
agaataaccccatctctttg

SEQ ID NO: 839 - RNA, 20 nt, synthetic construct
  misc_feature 1..20: note = HBV-targeting guide sequence portion
  source 1..20: mol_type = other RNA
agaatatggtgacccacaga

SEQ ID NO: 840 - RNA, 20 nt, synthetic construct
  misc_feature 1..20: note = HBV-targeting guide sequence portion
  source 1..20: mol_type = other RNA
agaatcccagaggattgctg

SEQ ID NO: 841 - RNA, 20 nt, synthetic construct
  misc_feature 1..20: note = HBV-targeting guide sequence portion
  source 1..20: mol_type = other RNA
agaatcctcacaataccgca

SEQ ID NO: 842 - RNA, 20 nt, synthetic construct
  misc_feature 1..20: note = HBV-targeting guide sequence portion
  source 1..20: mol_type = other RNA
agaatctttccaccagcaat

SEQ ID NO: 843 - RNA, 20 nt, synthetic construct
  misc_feature 1..20: note = HBV-targeting guide sequence portion
  source 1..20: mol_type = other RNA
agaatgaggcgctatgtgtt

SEQ ID NO: 844 - RNA, 20 nt, synthetic construct
  misc_feature 1..20: note = HBV-targeting guide sequence portion
  source 1..20: mol_type = other RNA
agaatgtttcagaaaactcc

SEQ ID NO: 845 - RNA, 20 nt, synthetic construct
  misc_feature 1..20: note = HBV-targeting guide sequence portion
  source 1..20: mol_type = other RNA
agaatgtttgctccagaccg

SEQ ID NO: 846 - RNA, 20 nt, synthetic construct
  misc_feature 1..20: note = HBV-targeting guide sequence portion
  source 1..20: mol_type = other RNA
agaattgcttgcctgagtgc

SEQ ID NO: 847 - RNA, 20 nt, synthetic construct
  misc_feature 1..20: note = HBV-targeting guide sequence portion
  source 1..20: mol_type = other RNA
agaattggtgggcgttcacg

SEQ ID NO: 848 - RNA, 20 nt, synthetic construct
  misc_feature 1..20: note = HBV-targeting guide sequence portion
  source 1..20: mol_type = other RNA
agaatttggagctactgtgg

SEQ ID NO: 849 - RNA, 20 nt, synthetic construct
  misc_feature 1..20: note = HBV-targeting guide sequence portion
  source 1..20: mol_type = other RNA
agacaaaagaaaattggtaa

SEQ ID NO: 850 - RNA, 20 nt, synthetic construct
  misc_feature 1..20: note = HBV-targeting guide sequence portion
  source 1..20: mol_type = other RNA
agacaactattgtggtttca

SEQ ID NO: 851 - RNA, 20 nt, synthetic construct
  misc_feature 1..20: note = HBV-targeting guide sequence portion
  source 1..20: mol_type = other RNA
agacaagaaatgtgaaacca

SEQ ID NO: 852 - RNA, 20 nt, synthetic construct
  misc_feature 1..20: note = HBV-targeting guide sequence portion
  source 1..20: mol_type = other RNA
agacacacggtagttccccc

SEQ ID NO: 853 - RNA, 20 nt, synthetic construct
  misc_feature 1..20: note = HBV-targeting guide sequence portion
  source 1..20: mol_type = other RNA
agacacatccagcgataacc

SEQ ID NO: 854 - RNA, 20 nt, synthetic construct
  misc_feature 1..20: note = HBV-targeting guide sequence portion
  source 1..20: mol_type = other RNA
agacaccaaatactctagga

SEQ ID NO: 855 - RNA, 20 nt, synthetic construct
  misc_feature 1..20: note = HBV-targeting guide sequence portion
  source 1..20: mol_type = other RNA
agacactatttacacactct

SEQ ID NO: 856 - RNA, 20 nt, synthetic construct
  misc_feature 1..20: note = HBV-targeting guide sequence portion
  source 1..20: mol_type = other RNA
agacagcggggtaggctgcc

SEQ ID NO: 857 - RNA, 20 nt, synthetic construct
  misc_feature 1..20: note = HBV-targeting guide sequence portion
  source 1..20: mol_type = other RNA
agacaggtacagtagaagaa

SEQ ID NO: 858 - RNA, 20 nt, synthetic construct
  misc_feature 1..20: note = HBV-targeting guide sequence portion
  source 1..20: mol_type = other RNA
agaccaatttatgcctacag

SEQ ID NO: 859 - RNA, 20 nt, synthetic construct
  misc_feature 1..20: note = HBV-targeting guide sequence portion
  source 1..20: mol_type = other RNA
agaccaccaaatgcccctat

SEQ ID NO: 860 - RNA, 20 nt, synthetic construct
  misc_feature 1..20: note = HBV-targeting guide sequence portion
  source 1..20: mol_type = other RNA
agaccaccgtgaacgcccac

SEQ ID NO: 861 - RNA, 20 nt, synthetic construct
  misc_feature 1..20: note = HBV-targeting guide sequence portion
  source 1..20: mol_type = other RNA
agacccacaattcgttgaca

SEQ ID NO: 862 - RNA, 20 nt, synthetic construct
  misc_feature 1..20: note = HBV-targeting guide sequence portion
  source 1..20: mol_type = other RNA
agaccggctgcgagcaaaac

SEQ ID NO: 863 - RNA, 20 nt, synthetic construct
  misc_feature 1..20: note = HBV-targeting guide sequence portion
  source 1..20: mol_type = other RNA
agacctggccgttgcctggc

SEQ ID NO: 864 - RNA, 20 nt, synthetic construct
  misc_feature 1..20: note = HBV-targeting guide sequence portion
  source 1..20: mol_type = other RNA
agaccttgggcaagaattgg

SEQ ID NO: 865 - RNA, 20 nt, synthetic construct
  misc_feature 1..20: note = HBV-targeting guide sequence portion
  source 1..20: mol_type = other RNA
agacgaagatctcaatcgcc

SEQ ID NO: 866 - RNA, 20 nt, synthetic construct
  misc_feature 1..20: note = HBV-targeting guide sequence portion
  source 1..20: mol_type = other RNA
agacgacgaggcaggtcccc

SEQ ID NO: 867 - RNA, 20 nt, synthetic construct
  misc_feature 1..20: note = HBV-targeting guide sequence portion
  source 1..20: mol_type = other RNA
agacgccaacaaggtaggag

SEQ ID NO: 868 - RNA, 20 nt, synthetic construct
  misc_feature 1..20: note = HBV-targeting guide sequence portion
  source 1..20: mol_type = other RNA
agacgggaaacataccttga

SEQ ID NO: 869 - RNA, 20 nt, synthetic construct
  misc_feature 1..20: note = HBV-targeting guide sequence portion
  source 1..20: mol_type = other RNA
agacggggagtccgcgtaaa

SEQ ID NO: 870 - RNA, 20 nt, synthetic construct
  misc_feature 1..20: note = HBV-targeting guide sequence portion
  source 1..20: mol_type = other RNA
agacggttgaaattgattat

SEQ ID NO: 871 - RNA, 20 nt, synthetic construct
  misc_feature 1..20: note = HBV-targeting guide sequence portion
  source 1..20: mol_type = other RNA
agactccaaggcatcccgat

SEQ ID NO: 872 - RNA, 20 nt, synthetic construct
  misc_feature 1..20: note = HBV-targeting guide sequence portion
  source 1..20: mol_type = other RNA
agactcgtggtggacttctc

SEQ ID NO: 873 - RNA, 20 nt, synthetic construct
  misc_feature 1..20: note = HBV-targeting guide sequence portion
  source 1..20: mol_type = other RNA
agactctgcggtattgtgag

SEQ ID NO: 874 - RNA, 20 nt, synthetic construct
  misc_feature 1..20: note = HBV-targeting guide sequence portion
  source 1..20: mol_type = other RNA
agactgggaggagttggggg

SEQ ID NO: 875 - RNA, 20 nt, synthetic construct
  misc_feature 1..20: note = HBV-targeting guide sequence portion
  source 1..20: mol_type = other RNA
agactgtttgtttaaagact

SEQ ID NO: 876 - RNA, 20 nt, synthetic construct
  misc_feature 1..20: note = HBV-targeting guide sequence portion
  source 1..20: mol_type = other RNA
agacttggcccccaatacca

SEQ ID NO: 877 - RNA, 20 nt, synthetic construct
  misc_feature 1..20: note = HBV-targeting guide sequence portion
  source 1..20: mol_type = other RNA
agacttgtgttgttagacga

SEQ ID NO: 878 - RNA, 20 nt, synthetic construct
  misc_feature 1..20: note = HBV-targeting guide sequence portion
  source 1..20: mol_type = other RNA
agagaaacgggctgaggccc

SEQ ID NO: 879 - RNA, 20 nt, synthetic construct
  misc_feature 1..20: note = HBV-targeting guide sequence portion
  source 1..20: mol_type = other RNA
agagaaacggtcctagagta

SEQ ID NO: 880 - RNA, 20 nt, synthetic construct
  misc_feature 1..20: note = HBV-targeting guide sequence portion
  source 1..20: mol_type = other RNA
agagaagaggacgacagggc

SEQ ID NO: 881 - RNA, 20 nt, synthetic construct
  misc_feature 1..20: note = HBV-targeting guide sequence portion
  source 1..20: mol_type = other RNA
agagaagtccaccacgagtc

SEQ ID NO: 882 - RNA, 20 nt, synthetic construct
  misc_feature 1..20: note = HBV-targeting guide sequence portion
  source 1..20: mol_type = other RNA
agagaataaccccatctctt

SEQ ID NO: 883 - RNA, 20 nt, synthetic construct
  misc_feature 1..20: note = HBV-targeting guide sequence portion
  source 1..20: mol_type = other RNA
agagaggtgcgccccgtggt

SEQ ID NO: 884 - RNA, 20 nt, synthetic construct
  misc_feature 1..20: note = HBV-targeting guide sequence portion
  source 1..20: mol_type = other RNA
agagagtccaagagtcctct

SEQ ID NO: 885 - RNA, 20 nt, synthetic construct
  misc_feature 1..20: note = HBV-targeting guide sequence portion
  source 1..20: mol_type = other RNA
agagagtgtcaacacatagc

SEQ ID NO: 886 - RNA, 20 nt, synthetic construct
  misc_feature 1..20: note = HBV-targeting guide sequence portion
  source 1..20: mol_type = other RNA
agagatgattaggcagaggt

SEQ ID NO: 887 - RNA, 20 nt, synthetic construct
  misc_feature 1..20: note = HBV-targeting guide sequence portion
  source 1..20: mol_type = other RNA
agagatggggttattctctt

SEQ ID NO: 888 - RNA, 20 nt, synthetic construct
  misc_feature 1..20: note = HBV-targeting guide sequence portion
  source 1..20: mol_type = other RNA
agagcaaactccaacaatcc

SEQ ID NO: 889 - RNA, 20 nt, synthetic construct
  misc_feature 1..20: note = HBV-targeting guide sequence portion
  source 1..20: mol_type = other RNA
agagctacagcatggggcag

SEQ ID NO: 890 - RNA, 20 nt, synthetic construct
  misc_feature 1..20: note = HBV-targeting guide sequence portion
  source 1..20: mol_type = other RNA
agagctgcggcggtatctag

SEQ ID NO: 891 - RNA, 20 nt, synthetic construct
  misc_feature 1..20: note = HBV-targeting guide sequence portion
  source 1..20: mol_type = other RNA
agaggaagatgataaaacgc

SEQ ID NO: 892 - RNA, 20 nt, synthetic construct
  misc_feature 1..20: note = HBV-targeting guide sequence portion
  source 1..20: mol_type = other RNA
agaggacaacagagttgtca

SEQ ID NO: 893 - RNA, 20 nt, synthetic construct
  misc_feature 1..20: note = HBV-targeting guide sequence portion
  source 1..20: mol_type = other RNA
agaggacagacgggaaacat

SEQ ID NO: 894 - RNA, 20 nt, synthetic construct
  misc_feature 1..20: note = HBV-targeting guide sequence portion
  source 1..20: mol_type = other RNA
agaggacgacagggccccaa

SEQ ID NO: 895 - RNA, 20 nt, synthetic construct
  misc_feature 1..20: note = HBV-targeting guide sequence portion
  source 1..20: mol_type = other RNA
agaggactcttggactctct

SEQ ID NO: 896 - RNA, 20 nt, synthetic construct
  misc_feature 1..20: note = HBV-targeting guide sequence portion
  source 1..20: mol_type = other RNA
agaggagccggaaaggttcc

SEQ ID NO: 897 - RNA, 20 nt, synthetic construct
  misc_feature 1..20: note = HBV-targeting guide sequence portion
  source 1..20: mol_type = other RNA
agaggattgctggtggaaag

SEQ ID NO: 898 - RNA, 20 nt, synthetic construct
  misc_feature 1..20: note = HBV-targeting guide sequence portion
  source 1..20: mol_type = other RNA
agaggcaggaggcggatttg

SEQ ID NO: 899 - RNA, 20 nt, synthetic construct
  misc_feature 1..20: note = HBV-targeting guide sequence portion
  source 1..20: mol_type = other RNA
agaggcagtagtcggaacag

SEQ ID NO: 900 - RNA, 20 nt, synthetic construct
  misc_feature 1..20: note = HBV-targeting guide sequence portion
  source 1..20: mol_type = other RNA
agaggcctgtatctccctgc

SEQ ID NO: 901 - RNA, 20 nt, synthetic construct
  misc_feature 1..20: note = HBV-targeting guide sequence portion
  source 1..20: mol_type = other RNA
agagggtgttttccaatgag

SEQ ID NO: 902 - RNA, 20 nt, synthetic construct
  misc_feature 1..20: note = HBV-targeting guide sequence portion
  source 1..20: mol_type = other RNA
agaggtgaaaaagttgcatg

SEQ ID NO: 903 - RNA, 20 nt, synthetic construct
  misc_feature 1..20: note = HBV-targeting guide sequence portion
  source 1..20: mol_type = other RNA
agaggtgaagcgaagtgcac

SEQ ID NO: 904 - RNA, 20 nt, synthetic construct
  misc_feature 1..20: note = HBV-targeting guide sequence portion
  source 1..20: mol_type = other RNA
agaggtgcgccccgtggtcg

SEQ ID NO: 905 - RNA, 20 nt, synthetic construct
  misc_feature 1..20: note = HBV-targeting guide sequence portion
  source 1..20: mol_type = other RNA
agaggtggagacagcggggt

SEQ ID NO: 906 - RNA, 20 nt, synthetic construct
  misc_feature 1..20: note = HBV-targeting guide sequence portion
  source 1..20: mol_type = other RNA
agaggttccttgagcaggag

SEQ ID NO: 907 - RNA, 20 nt, synthetic construct
  misc_feature 1..20: note = HBV-targeting guide sequence portion
  source 1..20: mol_type = other RNA
agagtaactccacagtagct

SEQ ID NO: 908 - RNA, 20 nt, synthetic construct
  misc_feature 1..20: note = HBV-targeting guide sequence portion
  source 1..20: mol_type = other RNA
agagtatttggtgtcttttg

SEQ ID NO: 909 - RNA, 20 nt, synthetic construct
  misc_feature 1..20: note = HBV-targeting guide sequence portion
  source 1..20: mol_type = other RNA
agagtcattagttctcccca

SEQ ID NO: 910 - RNA, 20 nt, synthetic construct
  misc_feature 1..20: note = HBV-targeting guide sequence portion
  source 1..20: mol_type = other RNA
agagtccaagagtcctctta

SEQ ID NO: 911 - RNA, 20 nt, synthetic construct
  misc_feature 1..20: note = HBV-targeting guide sequence portion
  source 1..20: mol_type = other RNA
agagtcctcttatgtaagac

SEQ ID NO: 912 - RNA, 20 nt, synthetic construct
  misc_feature 1..20: note = HBV-targeting guide sequence portion
  source 1..20: mol_type = other RNA
agagtctagactcgtggtgg

SEQ ID NO: 913 - RNA, 20 nt, synthetic construct
  misc_feature 1..20: note = HBV-targeting guide sequence portion
  source 1..20: mol_type = other RNA
agagtgagaggcctgtatct

SEQ ID NO: 914 - RNA, 20 nt, synthetic construct
  misc_feature 1..20: note = HBV-targeting guide sequence portion
  source 1..20: mol_type = other RNA
agagtgtcaacacatagcgc

SEQ ID NO: 915 - RNA, 20 nt, synthetic construct
  misc_feature 1..20: note = HBV-targeting guide sequence portion
  source 1..20: mol_type = other RNA
agagtgtgtaaatagtgtct

SEQ ID NO: 916 - RNA, 20 nt, synthetic construct
  misc_feature 1..20: note = HBV-targeting guide sequence portion
  source 1..20: mol_type = other RNA
agagttgtcagtcccgagaa

SEQ ID NO: 917 - RNA, 20 nt, synthetic construct
  misc_feature 1..20: note = HBV-targeting guide sequence portion
  source 1..20: mol_type = other RNA
agagtttggtggaaggttgt

SEQ ID NO: 918 - RNA, 20 nt, synthetic construct
  misc_feature 1..20: note = HBV-targeting guide sequence portion
  source 1..20: mol_type = other RNA
agatacaggcctctcactct

SEQ ID NO: 919 - RNA, 20 nt, synthetic construct
  misc_feature 1..20: note = HBV-targeting guide sequence portion
  source 1..20: mol_type = other RNA
agataccgccgcagctctgt

SEQ ID NO: 920 - RNA, 20 nt, synthetic construct
  misc_feature 1..20: note = HBV-targeting guide sequence portion
  source 1..20: mol_type = other RNA
agatattatcaaaaaatgtg

SEQ ID NO: 921 - RNA, 20 nt, synthetic construct
  misc_feature 1..20: note = HBV-targeting guide sequence portion
  source 1..20: mol_type = other RNA
agatcaagcatctagggacc

SEQ ID NO: 922 - RNA, 20 nt, synthetic construct
  misc_feature 1..20: note = HBV-targeting guide sequence portion
  source 1..20: mol_type = other RNA
agatcattaatctaatctcc

SEQ ID NO: 923 - RNA, 20 nt, synthetic construct
  misc_feature 1..20: note = HBV-targeting guide sequence portion
  source 1..20: mol_type = other RNA
agatcccagagtgagaggcc

SEQ ID NO: 924 - RNA, 20 nt, synthetic construct
  misc_feature 1..20: note = HBV-targeting guide sequence portion
  source 1..20: mol_type = other RNA
agatccccgagattgagatc

SEQ ID NO: 925 - RNA, 20 nt, synthetic construct
  misc_feature 1..20: note = HBV-targeting guide sequence portion
  source 1..20: mol_type = other RNA
agatctcaatcgccgcgtcg

SEQ ID NO: 926 - RNA, 20 nt, synthetic construct
  misc_feature 1..20: note = HBV-targeting guide sequence portion
  source 1..20: mol_type = other RNA
agatctcaatctcggggatc

SEQ ID NO: 927 - RNA, 20 nt, synthetic construct
  misc_feature 1..20: note = HBV-targeting guide sequence portion
  source 1..20: mol_type = other RNA
agatctcgtacggaaggaaa

SEQ ID NO: 928 - RNA, 20 nt, synthetic construct
  misc_feature 1..20: note = HBV-targeting guide sequence portion
  source 1..20: mol_type = other RNA
agatcttcgtctgcgaggcg

SEQ ID NO: 929 - RNA, 20 nt, synthetic construct
  misc_feature 1..20: note = HBV-targeting guide sequence portion
  source 1..20: mol_type = other RNA
agatcttctagataccgccg

SEQ ID NO: 930 - RNA, 20 nt, synthetic construct
  misc_feature 1..20: note = HBV-targeting guide sequence portion
  source 1..20: mol_type = other RNA
agatcttctgcgacgcggcg

SEQ ID NO: 931 - RNA, 20 nt, synthetic construct
  misc_feature 1..20: note = HBV-targeting guide sequence portion
  source 1..20: mol_type = other RNA
agatgagaaggcacagacgg

SEQ ID NO: 932 - RNA, 20 nt, synthetic construct
  misc_feature 1..20: note = HBV-targeting guide sequence portion
  source 1..20: mol_type = other RNA
agatgaggcatagcagcagg

SEQ ID NO: 933 - RNA, 20 nt, synthetic construct
  misc_feature 1..20: note = HBV-targeting guide sequence portion
  source 1..20: mol_type = other RNA
agatgataaaacgccgcaga

SEQ ID NO: 934 - RNA, 20 nt, synthetic construct
  misc_feature 1..20: note = HBV-targeting guide sequence portion
  source 1..20: mol_type = other RNA
agatgattaggcagaggtga

SEQ ID NO: 935 - RNA, 20 nt, synthetic construct
  misc_feature 1..20: note = HBV-targeting guide sequence portion
  source 1..20: mol_type = other RNA
agatgctgtacagacttggc

SEQ ID NO: 936 - RNA, 20 nt, synthetic construct
  misc_feature 1..20: note = HBV-targeting guide sequence portion
  source 1..20: mol_type = other RNA
agatgcttgatcttctaaat

SEQ ID NO: 937 - RNA, 20 nt, synthetic construct
  misc_feature 1..20: note = HBV-targeting guide sequence portion
  source 1..20: mol_type = other RNA
agatggggttattctcttaa

SEQ ID NO: 938 - RNA, 20 nt, synthetic construct
  misc_feature 1..20: note = HBV-targeting guide sequence portion
  source 1..20: mol_type = other RNA
agatgggtcgtccgcgggat

SEQ ID NO: 939 - RNA, 20 nt, synthetic construct
  misc_feature 1..20: note = HBV-targeting guide sequence portion
  source 1..20: mol_type = other RNA
agatgtatattaggaaaaga

SEQ ID NO: 940 - RNA, 20 nt, synthetic construct
  misc_feature 1..20: note = HBV-targeting guide sequence portion
  source 1..20: mol_type = other RNA
agatgttctggataataagg

SEQ ID NO: 941 - RNA, 20 nt, synthetic construct
  misc_feature 1..20: note = HBV-targeting guide sequence portion
  source 1..20: mol_type = other RNA
agattaatgatctttgtact

SEQ ID NO: 942 - RNA, 20 nt, synthetic construct
  misc_feature 1..20: note = HBV-targeting guide sequence portion
  source 1..20: mol_type = other RNA
agattagattaatgatcttt

SEQ ID NO: 943 - RNA, 20 nt, synthetic construct
  misc_feature 1..20: note = HBV-targeting guide sequence portion
  source 1..20: mol_type = other RNA
agattctgccccatgctgta

SEQ ID NO: 944 - RNA, 20 nt, synthetic construct
  misc_feature 1..20: note = HBV-targeting guide sequence portion
  source 1..20: mol_type = other RNA
agattgaatacatgcataca

SEQ ID NO: 945 - RNA, 20 nt, synthetic construct
  misc_feature 1..20: note = HBV-targeting guide sequence portion
  source 1..20: mol_type = other RNA
agattgacgatatgtgagag

SEQ ID NO: 946 - RNA, 20 nt, synthetic construct
  misc_feature 1..20: note = HBV-targeting guide sequence portion
  source 1..20: mol_type = other RNA
agattgagatcttctgcgac

SEQ ID NO: 947 - RNA, 20 nt, synthetic construct
  misc_feature 1..20: note = HBV-targeting guide sequence portion
  source 1..20: mol_type = other RNA
agattgggacttcaatccca

SEQ ID NO: 948 - RNA, 20 nt, synthetic construct
  misc_feature 1..20: note = HBV-targeting guide sequence portion
  source 1..20: mol_type = other RNA
agcaaaacaagcggctagga

SEQ ID NO: 949 - RNA, 20 nt, synthetic construct
  misc_feature 1..20: note = HBV-targeting guide sequence portion
  source 1..20: mol_type = other RNA
agcaaaacccagaagaccca

SEQ ID NO: 950 - RNA, 20 nt, synthetic construct
  misc_feature 1..20: note = HBV-targeting guide sequence portion
  source 1..20: mol_type = other RNA
agcaaacacttggcacagac

SEQ ID NO: 951 - RNA, 20 nt, synthetic construct
  misc_feature 1..20: note = HBV-targeting guide sequence portion
  source 1..20: mol_type = other RNA
agcaaacattctcgggactg

SEQ ID NO: 952 - RNA, 20 nt, synthetic construct
  misc_feature 1..20: note = HBV-targeting guide sequence portion
  source 1..20: mol_type = other RNA
agcaaactccaacaatccag

SEQ ID NO: 953 - RNA, 20 nt, synthetic construct
  misc_feature 1..20: note = HBV-targeting guide sequence portion
  source 1..20: mol_type = other RNA
agcaaagaattgcttgcctg

SEQ ID NO: 954 - RNA, 20 nt, synthetic construct
  misc_feature 1..20: note = HBV-targeting guide sequence portion
  source 1..20: mol_type = other RNA
agcaaatccgcctcctgcct

SEQ ID NO: 955 - RNA, 20 nt, synthetic construct
  misc_feature 1..20: note = HBV-targeting guide sequence portion
  source 1..20: mol_type = other RNA
agcaacaggagggatacata

SEQ ID NO: 956 - RNA, 20 nt, synthetic construct
  misc_feature 1..20: note = HBV-targeting guide sequence portion
  source 1..20: mol_type = other RNA
agcaatcctctgggattctt

SEQ ID NO: 957 - RNA, 20 nt, synthetic construct
  misc_feature 1..20: note = HBV-targeting guide sequence portion
  source 1..20: mol_type = other RNA
agcaattctttgctggggag

SEQ ID NO: 958 - RNA, 20 nt, synthetic construct
  misc_feature 1..20: note = HBV-targeting guide sequence portion
  source 1..20: mol_type = other RNA
agcacagcctagcagccatg

SEQ ID NO: 959 - RNA, 20 nt, synthetic construct
  misc_feature 1..20: note = HBV-targeting guide sequence portion
  source 1..20: mol_type = other RNA
agcaccatgcaactttttca

SEQ ID NO: 960 - RNA, 20 nt, synthetic construct
  misc_feature 1..20: note = HBV-targeting guide sequence portion
  source 1..20: mol_type = other RNA
agcacgggaccctgcagaac

SEQ ID NO: 961 - RNA, 20 nt, synthetic construct
  misc_feature 1..20: note = HBV-targeting guide sequence portion
  source 1..20: mol_type = other RNA
agcagcaggatgaagaggaa

SEQ ID NO: 962 - RNA, 20 nt, synthetic construct
  misc_feature 1..20: note = HBV-targeting guide sequence portion
  source 1..20: mol_type = other RNA
agcagccatgggaacgatgt

SEQ ID NO: 963 - RNA, 20 nt, synthetic construct
  misc_feature 1..20: note = HBV-targeting guide sequence portion
  source 1..20: mol_type = other RNA
agcaggagtcgtgcaggttc

SEQ ID NO: 964 - RNA, 20 nt, synthetic construct
  misc_feature 1..20: note = HBV-targeting guide sequence portion
  source 1..20: mol_type = other RNA
agcaggataaccacattgtg

SEQ ID NO: 965 - RNA, 20 nt, synthetic construct
  misc_feature 1..20: note = HBV-targeting guide sequence portion
  source 1..20: mol_type = other RNA
agcaggatgaagaggaagat

SEQ ID NO: 966 - RNA, 20 nt, synthetic construct
  misc_feature 1..20: note = HBV-targeting guide sequence portion
  source 1..20: mol_type = other RNA
agcaggcataatcaatttca

SEQ ID NO: 967 - RNA, 20 nt, synthetic construct
  misc_feature 1..20: note = HBV-targeting guide sequence portion
  source 1..20: mol_type = other RNA
agcaggctttcactttttcg

SEQ ID NO: 968 - RNA, 20 nt, synthetic construct
  misc_feature 1..20: note = HBV-targeting guide sequence portion
  source 1..20: mol_type = other RNA
agcagggagatacaggcctc

SEQ ID NO: 969 - RNA, 20 nt, synthetic construct
  misc_feature 1..20: note = HBV-targeting guide sequence portion
  source 1..20: mol_type = other RNA
agcaggggtcctaggaatcc

SEQ ID NO: 970 - RNA, 20 nt, synthetic construct
  misc_feature 1..20: note = HBV-targeting guide sequence portion
  source 1..20: mol_type = other RNA
agcatctagggacctagtag

SEQ ID NO: 971 - RNA, 20 nt, synthetic construct
  misc_feature 1..20: note = HBV-targeting guide sequence portion
  source 1..20: mol_type = other RNA
agcatcttgagtccctttat

SEQ ID NO: 972 - RNA, 20 nt, synthetic construct
  misc_feature 1..20: note = HBV-targeting guide sequence portion
  source 1..20: mol_type = other RNA
agcatggggcagaatctttc

SEQ ID NO: 973 - RNA, 20 nt, synthetic construct
  misc_feature 1..20: note = HBV-targeting guide sequence portion
  source 1..20: mol_type = other RNA
agcattcgggctagggttca

SEQ ID NO: 974 - RNA, 20 nt, synthetic construct
  misc_feature 1..20: note = HBV-targeting guide sequence portion
  source 1..20: mol_type = other RNA
agcattgttcacctcaccat

SEQ ID NO: 975 - RNA, 20 nt, synthetic construct
  misc_feature 1..20: note = HBV-targeting guide sequence portion
  source 1..20: mol_type = other RNA
agccaaacagtgggggaaag

SEQ ID NO: 976 - RNA, 20 nt, synthetic construct
  misc_feature 1..20: note = HBV-targeting guide sequence portion
  source 1..20: mol_type = other RNA
agccaagagaaacgggctga

SEQ ID NO: 977 - RNA, 20 nt, synthetic construct
  misc_feature 1..20: note = HBV-targeting guide sequence portion
  source 1..20: mol_type = other RNA
agccaccagcagggagatac

SEQ ID NO: 978 - RNA, 20 nt, synthetic construct
  misc_feature 1..20: note = HBV-targeting guide sequence portion
  source 1..20: mol_type = other RNA
agccacccaaggcacagctt

SEQ ID NO: 979 - RNA, 20 nt, synthetic construct
  misc_feature 1..20: note = HBV-targeting guide sequence portion
  source 1..20: mol_type = other RNA
agccatgggaacgatgtata

SEQ ID NO: 980 - RNA, 20 nt, synthetic construct
  misc_feature 1..20: note = HBV-targeting guide sequence portion
  source 1..20: mol_type = other RNA
agcccaggatgatgggatgg

SEQ ID NO: 981 - RNA, 20 nt, synthetic construct
  misc_feature 1..20: note = HBV-targeting guide sequence portion
  source 1..20: mol_type = other RNA
agcccatgaaattaagagaa

SEQ ID NO: 982 - RNA, 20 nt, synthetic construct
  misc_feature 1..20: note = HBV-targeting guide sequence portion
  source 1..20: mol_type = other RNA
agccccaaccagtgggggtt

SEQ ID NO: 983 - RNA, 20 nt, synthetic construct
  misc_feature 1..20: note = HBV-targeting guide sequence portion
  source 1..20: mol_type = other RNA
agccccgtaaaatttcccac

SEQ ID NO: 984 - RNA, 20 nt, synthetic construct
  misc_feature 1..20: note = HBV-targeting guide sequence portion
  source 1..20: mol_type = other RNA
agcccgaatgctccagctcc

SEQ ID NO: 985 - RNA, 20 nt, synthetic construct
  misc_feature 1..20: note = HBV-targeting guide sequence portion
  source 1..20: mol_type = other RNA
agcccgtttctcttggctca

SEQ ID NO: 986 - RNA, 20 nt, synthetic construct
  misc_feature 1..20: note = HBV-targeting guide sequence portion
  source 1..20: mol_type = other RNA
agccctacgaaccactgaac

SEQ ID NO: 987 - RNA, 20 nt, synthetic construct
  misc_feature 1..20: note = HBV-targeting guide sequence portion
  source 1..20: mol_type = other RNA
agccctcaggctcagggcat

SEQ ID NO: 988 - RNA, 20 nt, synthetic construct
  misc_feature 1..20: note = HBV-targeting guide sequence portion
  source 1..20: mol_type = other RNA
agccgcttgttttgctcgca

SEQ ID NO: 989 - RNA, 20 nt, synthetic construct
  misc_feature 1..20: note = HBV-targeting guide sequence portion
  source 1..20: mol_type = other RNA
agccggaaaggttccacgca

SEQ ID NO: 990 - RNA, 20 nt, synthetic construct
  misc_feature 1..20: note = HBV-targeting guide sequence portion
  source 1..20: mol_type = other RNA
agccggtctggagcaaacat

SEQ ID NO: 991 - RNA, 20 nt, synthetic construct
  misc_feature 1..20: note = HBV-targeting guide sequence portion
  source 1..20: mol_type = other RNA
agcctaccccgctgtctcca

SEQ ID NO: 992 - RNA, 20 nt, synthetic construct
  misc_feature 1..20: note = HBV-targeting guide sequence portion
  source 1..20: mol_type = other RNA
agcctagcagccatgggaac

SEQ ID NO: 993 - RNA, 20 nt, synthetic construct
  misc_feature 1..20: note = HBV-targeting guide sequence portion
  source 1..20: mol_type = other RNA
agcctccaagctgtgccttg

SEQ ID NO: 994 - RNA, 20 nt, synthetic construct
  misc_feature 1..20: note = HBV-targeting guide sequence portion
  source 1..20: mol_type = other RNA
agcctcctagtacaaagatc

SEQ ID NO: 995 - RNA, 20 nt, synthetic construct
  misc_feature 1..20: note = HBV-targeting guide sequence portion
  source 1..20: mol_type = other RNA
agcctgagggctccacccca

SEQ ID NO: 996 - RNA, 20 nt, synthetic construct
  misc_feature 1..20: note = HBV-targeting guide sequence portion
  source 1..20: mol_type = other RNA
agcctgcttagattgaatac

SEQ ID NO: 997 - RNA, 20 nt, synthetic construct
  misc_feature 1..20: note = HBV-targeting guide sequence portion
  source 1..20: mol_type = other RNA
agccttcagagcaaactcca

SEQ ID NO: 998 - RNA, 20 nt, synthetic construct
  misc_feature 1..20: note = HBV-targeting guide sequence portion
  source 1..20: mol_type = other RNA
agcgaagtgcacacggtccg

SEQ ID NO: 999 - RNA, 20 nt, synthetic construct
  misc_feature 1..20: note = HBV-targeting guide sequence portion
  source 1..20: mol_type = other RNA
agcgataaccaggacaagtt

SEQ ID NO: 1000 - RNA, 20 nt, synthetic construct
  misc_feature 1..20: note = HBV-targeting guide sequence portion
  source 1..20: mol_type = other RNA
agcgcagggtccccaatcct

SEQ ID NO: 1001 - RNA, 20 nt, synthetic construct
  misc_feature 1..20: note = HBV-targeting guide sequence portion
  source 1..20: mol_type = other RNA
agcgcatgcgtggaaccttt

SEQ ID NO: 1002 - RNA, 20 nt, synthetic construct
  misc_feature 1..20: note = HBV-targeting guide sequence portion
  source 1..20: mol_type = other RNA
agcgccgacgggacgtaaac

SEQ ID NO: 1003 - RNA, 20 nt, synthetic construct
  misc_feature 1..20: note = HBV-targeting guide sequence portion
  source 1..20: mol_type = other RNA
agcgcctcattctgtgggtc

SEQ ID NO: 1004 - RNA, 20 nt, synthetic construct
  misc_feature 1..20: note = HBV-targeting guide sequence portion
  source 1..20: mol_type = other RNA
agcggcctcgagatgggtcg

SEQ ID NO: 1005 - RNA, 20 nt, synthetic construct
  misc_feature 1..20: note = HBV-targeting guide sequence portion
  source 1..20: mol_type = other RNA
agcggctaggagttccgcag

SEQ ID NO: 1006 - RNA, 20 nt, synthetic construct
  misc_feature 1..20: note = HBV-targeting guide sequence portion
  source 1..20: mol_type = other RNA
agcgggcctacaaactgttc

SEQ ID NO: 1007 - RNA, 20 nt, synthetic construct
  misc_feature 1..20: note = HBV-targeting guide sequence portion
  source 1..20: mol_type = other RNA
agcggggtaggctgccgtcc

SEQ ID NO: 1008 - RNA, 20 nt, synthetic construct
  misc_feature 1..20: note = HBV-targeting guide sequence portion
  source 1..20: mol_type = other RNA
agcggtataaagggactcaa

SEQ ID NO: 1009 - RNA, 20 nt, synthetic construct
  misc_feature 1..20: note = HBV-targeting guide sequence portion
  source 1..20: mol_type = other RNA
agctacagcatggggcagaa

SEQ ID NO: 1010 - RNA, 20 nt, synthetic construct
  misc_feature 1..20: note = HBV-targeting guide sequence portion
  source 1..20: mol_type = other RNA
agctacctgggtgggtacta

SEQ ID NO: 1011 - RNA, 20 nt, synthetic construct
  misc_feature 1..20: note = HBV-targeting guide sequence portion
  source 1..20: mol_type = other RNA
agctactgtggagttactct

SEQ ID NO: 1012 - RNA, 20 nt, synthetic construct
  misc_feature 1..20: note = HBV-targeting guide sequence portion
  source 1..20: mol_type = other RNA
agctagagtcattagttctc

SEQ ID NO: 1013 - RNA, 20 nt, synthetic construct
  misc_feature 1..20: note = HBV-targeting guide sequence portion
  source 1..20: mol_type = other RNA
agctccaaattctttatatg

SEQ ID NO: 1014 - RNA, 20 nt, synthetic construct
  misc_feature 1..20: note = HBV-targeting guide sequence portion
  source 1..20: mol_type = other RNA
agctcctaccttgttggcgt

SEQ ID NO: 1015 - RNA, 20 nt, synthetic construct
  misc_feature 1..20: note = HBV-targeting guide sequence portion
  source 1..20: mol_type = other RNA
agctctgtatcgggatgcct

SEQ ID NO: 1016 - RNA, 20 nt, synthetic construct
  misc_feature 1..20: note = HBV-targeting guide sequence portion
  source 1..20: mol_type = other RNA
agctcttgttcccaagaata

SEQ ID NO: 1017 - RNA, 20 nt, synthetic construct
  misc_feature 1..20: note = HBV-targeting guide sequence portion
  source 1..20: mol_type = other RNA
agctgcggcggtatctagaa

SEQ ID NO: 1018 - RNA, 20 nt, synthetic construct
  misc_feature 1..20: note = HBV-targeting guide sequence portion
  source 1..20: mol_type = other RNA
agctggagcattcgggctag

SEQ ID NO: 1019 - RNA, 20 nt, synthetic construct
  misc_feature 1..20: note = HBV-targeting guide sequence portion
  source 1..20: mol_type = other RNA
agctggaggagtgcgaatcc

SEQ ID NO: 1020 - RNA, 20 nt, synthetic construct
  misc_feature 1..20: note = HBV-targeting guide sequence portion
  source 1..20: mol_type = other RNA
agctgtgccttgggtggctt

SEQ ID NO: 1021 - RNA, 20 nt, synthetic construct
  misc_feature 1..20: note = HBV-targeting guide sequence portion
  source 1..20: mol_type = other RNA
agcttatagaccaccaaatg

SEQ ID NO: 1022 - RNA, 20 nt, synthetic construct
  misc_feature 1..20: note = HBV-targeting guide sequence portion
  source 1..20: mol_type = other RNA
agcttggaggcttgaacagt

SEQ ID NO: 1023 - RNA, 20 nt, synthetic construct
  misc_feature 1..20: note = HBV-targeting guide sequence portion
  source 1..20: mol_type = other RNA
aggaaaaccccgcctgtaac

SEQ ID NO: 1024 - RNA, 20 nt, synthetic construct
  misc_feature 1..20: note = HBV-targeting guide sequence portion
  source 1..20: mol_type = other RNA
aggaaaagagggtgttttcc

SEQ ID NO: 1025 - RNA, 20 nt, synthetic construct
  misc_feature 1..20: note = HBV-targeting guide sequence portion
  source 1..20: mol_type = other RNA
aggaaagaagtcagaaggca

SEQ ID NO: 1026 - RNA, 20 nt, synthetic construct
  misc_feature 1..20: note = HBV-targeting guide sequence portion
  source 1..20: mol_type = other RNA
aggaacagtaaaccctgttc

SEQ ID NO: 1027 - RNA, 20 nt, synthetic construct
  misc_feature 1..20: note = HBV-targeting guide sequence portion
  source 1..20: mol_type = other RNA
aggaacctctatgtatccct

SEQ ID NO: 1028 - RNA, 20 nt, synthetic construct
  misc_feature 1..20: note = HBV-targeting guide sequence portion
  source 1..20: mol_type = other RNA
aggaagatgataaaacgccg

SEQ ID NO: 1029 - RNA, 20 nt, synthetic construct
  misc_feature 1..20: note = HBV-targeting guide sequence portion
  source 1..20: mol_type = other RNA
aggaatcctgatgtgatgtt

SEQ ID NO: 1030 - RNA, 20 nt, synthetic construct
  misc_feature 1..20: note = HBV-targeting guide sequence portion
  source 1..20: mol_type = other RNA
aggaattttccgaaagccca

SEQ ID NO: 1031 - RNA, 20 nt, synthetic construct
  misc_feature 1..20: note = HBV-targeting guide sequence portion
  source 1..20: mol_type = other RNA
aggacaacagagttgtcagt

SEQ ID NO: 1032 - RNA, 20 nt, synthetic construct
  misc_feature 1..20: note = HBV-targeting guide sequence portion
  source 1..20: mol_type = other RNA
aggacaagttggaggacagg

SEQ ID NO: 1033 - RNA, 20 nt, synthetic construct
  misc_feature 1..20: note = HBV-targeting guide sequence portion
  source 1..20: mol_type = other RNA
aggacagacgggaaacatac

SEQ ID NO: 1034 - RNA, 20 nt, synthetic construct
  misc_feature 1..20: note = HBV-targeting guide sequence portion
  source 1..20: mol_type = other RNA
aggacaggaggttggtgagt

SEQ ID NO: 1035 - RNA, 20 nt, synthetic construct
  misc_feature 1..20: note = HBV-targeting guide sequence portion
  source 1..20: mol_type = other RNA
aggacatgaacaagagatga

SEQ ID NO: 1036 - RNA, 20 nt, synthetic construct
  misc_feature 1..20: note = HBV-targeting guide sequence portion
  source 1..20: mol_type = other RNA
aggacccctgctcgtgttac

SEQ ID NO: 1037 - RNA, 20 nt, synthetic construct
  misc_feature 1..20: note = HBV-targeting guide sequence portion
  source 1..20: mol_type = other RNA
aggaccgtttctcttccaaa

SEQ ID NO: 1038 - RNA, 20 nt, synthetic construct
  misc_feature 1..20: note = HBV-targeting guide sequence portion
  source 1..20: mol_type = other RNA
aggacgacagggccccaagc

SEQ ID NO: 1039 - RNA, 20 nt, synthetic construct
  misc_feature 1..20: note = HBV-targeting guide sequence portion
  source 1..20: mol_type = other RNA
aggacggcagcctaccccgc

SEQ ID NO: 1040 - RNA, 20 nt, synthetic construct
  misc_feature 1..20: note = HBV-targeting guide sequence portion
  source 1..20: mol_type = other RNA
aggacgtcccgcgcaggatc

SEQ ID NO: 1041 - RNA, 20 nt, synthetic construct
  misc_feature 1..20: note = HBV-targeting guide sequence portion
  source 1..20: mol_type = other RNA
aggactcttggactctctgc

SEQ ID NO: 1042 - RNA, 20 nt, synthetic construct
  misc_feature 1..20: note = HBV-targeting guide sequence portion
  source 1..20: mol_type = other RNA
aggagactccaaggcatccc

SEQ ID NO: 1043 - RNA, 20 nt, synthetic construct
  misc_feature 1..20: note = HBV-targeting guide sequence portion
  source 1..20: mol_type = other RNA
aggagattagattaatgatc

SEQ ID NO: 1044 - RNA, 20 nt, synthetic construct
  misc_feature 1..20: note = HBV-targeting guide sequence portion
  source 1..20: mol_type = other RNA
aggagccggaaaggttccac

SEQ ID NO: 1045 - RNA, 20 nt, synthetic construct
  misc_feature 1..20: note = HBV-targeting guide sequence portion
  source 1..20: mol_type = other RNA
aggagctggagcattcgggc

SEQ ID NO: 1046 - RNA, 20 nt, synthetic construct
  misc_feature 1..20: note = HBV-targeting guide sequence portion
  source 1..20: mol_type = other RNA
aggaggcggatttgctggca

SEQ ID NO: 1047 - RNA, 20 nt, synthetic construct
  misc_feature 1..20: note = HBV-targeting guide sequence portion
  source 1..20: mol_type = other RNA
aggaggctgtaggcataaat

SEQ ID NO: 1048 - RNA, 20 nt, synthetic construct
  misc_feature 1..20: note = HBV-targeting guide sequence portion
  source 1..20: mol_type = other RNA
aggagggatacatagaggtt

SEQ ID NO: 1049 - RNA, 20 nt, synthetic construct
  misc_feature 1..20: note = HBV-targeting guide sequence portion
  source 1..20: mol_type = other RNA
aggaggttggtgagtgattg

SEQ ID NO: 1050 - RNA, 20 nt, synthetic construct
  misc_feature 1..20: note = HBV-targeting guide sequence portion
  source 1..20: mol_type = other RNA
aggagtcgtgcaggttctgc

SEQ ID NO: 1051 - RNA, 20 nt, synthetic construct
  misc_feature 1..20: note = HBV-targeting guide sequence portion
  source 1..20: mol_type = other RNA
aggagtgcgaatccacactc

SEQ ID NO: 1052 - RNA, 20 nt, synthetic construct
  misc_feature 1..20: note = HBV-targeting guide sequence portion
  source 1..20: mol_type = other RNA
aggagttccgcagtatggat

SEQ ID NO: 1053 - RNA, 20 nt, synthetic construct
  misc_feature 1..20: note = HBV-targeting guide sequence portion
  source 1..20: mol_type = other RNA
aggagttgggggaggagatt

SEQ ID NO: 1054 - RNA, 20 nt, synthetic construct
  misc_feature 1..20: note = HBV-targeting guide sequence portion
  source 1..20: mol_type = other RNA
aggataaaacctagcaggca

SEQ ID NO: 1055 - RNA, 20 nt, synthetic construct
  misc_feature 1..20: note = HBV-targeting guide sequence portion
  source 1..20: mol_type = other RNA
aggataaccacattgtgtaa

SEQ ID NO: 1056 - RNA, 20 nt, synthetic construct
  misc_feature 1..20: note = HBV-targeting guide sequence portion
  source 1..20: mol_type = other RNA
aggataggggcatttggtgg

SEQ ID NO: 1057 - RNA, 20 nt, synthetic construct
  misc_feature 1..20: note = HBV-targeting guide sequence portion
  source 1..20: mol_type = other RNA
aggatcatcaaccaccagca

SEQ ID NO: 1058 - RNA, 20 nt, synthetic construct
  misc_feature 1..20: note = HBV-targeting guide sequence portion
  source 1..20: mol_type = other RNA
aggatccagttggcagcaca

SEQ ID NO: 1059 - RNA, 20 nt, synthetic construct
  misc_feature 1..20: note = HBV-targeting guide sequence portion
  source 1..20: mol_type = other RNA
aggatccctggccagacgcc

SEQ ID NO: 1060 - RNA, 20 nt, synthetic construct
  misc_feature 1..20: note = HBV-targeting guide sequence portion
  source 1..20: mol_type = other RNA
aggatgaagaggaagatgat

SEQ ID NO: 1061 - RNA, 20 nt, synthetic construct
  misc_feature 1..20: note = HBV-targeting guide sequence portion
  source 1..20: mol_type = other RNA
aggatgagtgtttctcagag

SEQ ID NO: 1062 - RNA, 20 nt, synthetic construct
  misc_feature 1..20: note = HBV-targeting guide sequence portion
  source 1..20: mol_type = other RNA
aggatgatgggatgggaata

SEQ ID NO: 1063 - RNA, 20 nt, synthetic construct
  misc_feature 1..20: note = HBV-targeting guide sequence portion
  source 1..20: mol_type = other RNA
aggattcctaggacccctgc

SEQ ID NO: 1064 - RNA, 20 nt, synthetic construct
  misc_feature 1..20: note = HBV-targeting guide sequence portion
  source 1..20: mol_type = other RNA
aggattcttgtcaacaagga

SEQ ID NO: 1065 - RNA, 20 nt, synthetic construct
  misc_feature 1..20: note = HBV-targeting guide sequence portion
  source 1..20: mol_type = other RNA
aggattgctggtggaaagat

SEQ ID NO: 1066 - RNA, 20 nt, synthetic construct
  misc_feature 1..20: note = HBV-targeting guide sequence portion
  source 1..20: mol_type = other RNA
aggattggggaccctgcgct

SEQ ID NO: 1067 - RNA, 20 nt, synthetic construct
  misc_feature 1..20: note = HBV-targeting guide sequence portion
  source 1..20: mol_type = other RNA
aggcaaaaacgagagtaact

SEQ ID NO: 1068 - RNA, 20 nt, synthetic construct
  misc_feature 1..20: note = HBV-targeting guide sequence portion
  source 1..20: mol_type = other RNA
aggcaacggccaggtctgtg

SEQ ID NO: 1069 - RNA, 20 nt, synthetic construct
  misc_feature 1..20: note = HBV-targeting guide sequence portion
  source 1..20: mol_type = other RNA
aggcaagcaattctttgctg

SEQ ID NO: 1070 - RNA, 20 nt, synthetic construct
  misc_feature 1..20: note = HBV-targeting guide sequence portion
  source 1..20: mol_type = other RNA
aggcacagacggggagtccg

SEQ ID NO: 1071 - RNA, 20 nt, synthetic construct
  misc_feature 1..20: note = HBV-targeting guide sequence portion
  source 1..20: mol_type = other RNA
aggcacagcttggaggcttg

SEQ ID NO: 1072 - RNA, 20 nt, synthetic construct
  misc_feature 1..20: note = HBV-targeting guide sequence portion
  source 1..20: mol_type = other RNA
aggcagagaagaggacgaca

SEQ ID NO: 1073 - RNA, 20 nt, synthetic construct
  misc_feature 1..20: note = HBV-targeting guide sequence portion
  source 1..20: mol_type = other RNA
aggcagaggtgaaaaagttg

SEQ ID NO: 1074 - RNA, 20 nt, synthetic construct
  misc_feature 1..20: note = HBV-targeting guide sequence portion
  source 1..20: mol_type = other RNA
aggcaggaggcggatttgct

SEQ ID NO: 1075 - RNA, 20 nt, synthetic construct
  misc_feature 1..20: note = HBV-targeting guide sequence portion
  source 1..20: mol_type = other RNA
aggcaggtcccctagaagaa

SEQ ID NO: 1076 - RNA, 20 nt, synthetic construct
  misc_feature 1..20: note = HBV-targeting guide sequence portion
  source 1..20: mol_type = other RNA
aggcagtagtcggaacaggg

SEQ ID NO: 1077 - RNA, 20 nt, synthetic construct
  misc_feature 1..20: note = HBV-targeting guide sequence portion
  source 1..20: mol_type = other RNA
aggcataaattggtctgcgc

SEQ ID NO: 1078 - RNA, 20 nt, synthetic construct
  misc_feature 1..20: note = HBV-targeting guide sequence portion
  source 1..20: mol_type = other RNA
aggcataatcaatttcaacc

SEQ ID NO: 1079 - RNA, 20 nt, synthetic construct
  misc_feature 1..20: note = HBV-targeting guide sequence portion
  source 1..20: mol_type = other RNA
aggcatacttcaaagactgt

SEQ ID NO: 1080 - RNA, 20 nt, synthetic construct
  misc_feature 1..20: note = HBV-targeting guide sequence portion
  source 1..20: mol_type = other RNA
aggcatagcagcaggatgaa

SEQ ID NO: 1081 - RNA, 20 nt, synthetic construct
  misc_feature 1..20: note = HBV-targeting guide sequence portion
  source 1..20: mol_type = other RNA
aggcatcccgatacagagct

SEQ ID NO: 1082 - RNA, 20 nt, synthetic construct
  misc_feature 1..20: note = HBV-targeting guide sequence portion
  source 1..20: mol_type = other RNA
aggccatcagcgcatgcgtg

SEQ ID NO: 1083 - RNA, 20 nt, synthetic construct
  misc_feature 1..20: note = HBV-targeting guide sequence portion
  source 1..20: mol_type = other RNA
aggcccactcccataggaat

SEQ ID NO: 1084 - RNA, 20 nt, synthetic construct
  misc_feature 1..20: note = HBV-targeting guide sequence portion
  source 1..20: mol_type = other RNA
aggcccatatgagtgttgac

SEQ ID NO: 1085 - RNA, 20 nt, synthetic construct
  misc_feature 1..20: note = HBV-targeting guide sequence portion
  source 1..20: mol_type = other RNA
aggcccgcttacagttaatg

SEQ ID NO: 1086 - RNA, 20 nt, synthetic construct
  misc_feature 1..20: note = HBV-targeting guide sequence portion
  source 1..20: mol_type = other RNA
aggccgcttggggccctgtc

SEQ ID NO: 1087 - RNA, 20 nt, synthetic construct
  misc_feature 1..20: note = HBV-targeting guide sequence portion
  source 1..20: mol_type = other RNA
aggcctattgattggaaagt

SEQ ID NO: 1088 - RNA, 20 nt, synthetic construct
  misc_feature 1..20: note = HBV-targeting guide sequence portion
  source 1..20: mol_type = other RNA
aggcctccgtgcggtggggt

SEQ ID NO: 1089 - RNA, 20 nt, synthetic construct
  misc_feature 1..20: note = HBV-targeting guide sequence portion
  source 1..20: mol_type = other RNA
aggcctctcactctgggatc

SEQ ID NO: 1090 - RNA, 20 nt, synthetic construct
  misc_feature 1..20: note = HBV-targeting guide sequence portion
  source 1..20: mol_type = other RNA
aggcctgtatctccctgctg

SEQ ID NO: 1091 - RNA, 20 nt, synthetic construct
  misc_feature 1..20: note = HBV-targeting guide sequence portion
  source 1..20: mol_type = other RNA
aggcctgttaaccgggagtt

SEQ ID NO: 1092 - RNA, 20 nt, synthetic construct
  misc_feature 1..20: note = HBV-targeting guide sequence portion
  source 1..20: mol_type = other RNA
aggccttgtaagttggcgaa

SEQ ID NO: 1093 - RNA, 20 nt, synthetic construct
  misc_feature 1..20: note = HBV-targeting guide sequence portion
  source 1..20: mol_type = other RNA
aggcctttctgtgtaaacaa

SEQ ID NO: 1094 - RNA, 20 nt, synthetic construct
  misc_feature 1..20: note = HBV-targeting guide sequence portion
  source 1..20: mol_type = other RNA
aggccttttggggtggagcc

SEQ ID NO: 1095 - RNA, 20 nt, synthetic construct
  misc_feature 1..20: note = HBV-targeting guide sequence portion
  source 1..20: mol_type = other RNA
aggcgagggagttcttcttc

SEQ ID NO: 1096 - RNA, 20 nt, synthetic construct
  misc_feature 1..20: note = HBV-targeting guide sequence portion
  source 1..20: mol_type = other RNA
aggcgctatgtgttgacact

SEQ ID NO: 1097 - RNA, 20 nt, synthetic construct
  misc_feature 1..20: note = HBV-targeting guide sequence portion
  source 1..20: mol_type = other RNA
aggcggatttgctggcaagg

SEQ ID NO: 1098 - RNA, 20 nt, synthetic construct
  misc_feature 1..20: note = HBV-targeting guide sequence portion
  source 1..20: mol_type = other RNA
aggcggggttttccttgttg

SEQ ID NO: 1099 - RNA, 20 nt, synthetic construct
  misc_feature 1..20: note = HBV-targeting guide sequence portion
  source 1..20: mol_type = other RNA
aggcgggtgttttatataag

SEQ ID NO: 1100 - RNA, 20 nt, synthetic construct
  misc_feature 1..20: note = HBV-targeting guide sequence portion
  source 1..20: mol_type = other RNA
aggctcagggcataatgcaa

SEQ ID NO: 1101 - RNA, 20 nt, synthetic construct
  misc_feature 1..20: note = HBV-targeting guide sequence portion
  source 1..20: mol_type = other RNA
aggctgccgtcctgactggc

SEQ ID NO: 1102 - RNA, 20 nt, synthetic construct
  misc_feature 1..20: note = HBV-targeting guide sequence portion
  source 1..20: mol_type = other RNA
aggctgggtccaactggtgg

SEQ ID NO: 1103 - RNA, 20 nt, synthetic construct
  misc_feature 1..20: note = HBV-targeting guide sequence portion
  source 1..20: mol_type = other RNA
aggctgtaggcataaattgg

SEQ ID NO: 1104 - RNA, 20 nt, synthetic construct
  misc_feature 1..20: note = HBV-targeting guide sequence portion
  source 1..20: mol_type = other RNA
aggctgtgctgccaactgga

SEQ ID NO: 1105 - RNA, 20 nt, synthetic construct
  misc_feature 1..20: note = HBV-targeting guide sequence portion
  source 1..20: mol_type = other RNA
aggcttgaacagtaggacat

SEQ ID NO: 1106 - RNA, 20 nt, synthetic construct
  misc_feature 1..20: note = HBV-targeting guide sequence portion
  source 1..20: mol_type = other RNA
aggctttcactttttcgcca

SEQ ID NO: 1107 - RNA, 20 nt, synthetic construct
  misc_feature 1..20: note = HBV-targeting guide sequence portion
  source 1..20: mol_type = other RNA
agggacctagtagtcagtta

SEQ ID NO: 1108 - RNA, 20 nt, synthetic construct
  misc_feature 1..20: note = HBV-targeting guide sequence portion
  source 1..20: mol_type = other RNA
agggactcaagatgctgtac

SEQ ID NO: 1109 - RNA, 20 nt, synthetic construct
  misc_feature 1..20: note = HBV-targeting guide sequence portion
  source 1..20: mol_type = other RNA
agggagatacaggcctctca

SEQ ID NO: 1110 - RNA, 20 nt, synthetic construct
  misc_feature 1..20: note = HBV-targeting guide sequence portion
  source 1..20: mol_type = other RNA
agggagttcttcttctaggg

SEQ ID NO: 1111 - RNA, 20 nt, synthetic construct
  misc_feature 1..20: note = HBV-targeting guide sequence portion
  source 1..20: mol_type = other RNA
agggatacatagaggttcct

SEQ ID NO: 1112 - RNA, 20 nt, synthetic construct
  misc_feature 1..20: note = HBV-targeting guide sequence portion
  source 1..20: mol_type = other RNA
agggatactaacattgagat

SEQ ID NO: 1113 - RNA, 20 nt, synthetic construct
  misc_feature 1..20: note = HBV-targeting guide sequence portion
  source 1..20: mol_type = other RNA
agggatccttgttgggattg

SEQ ID NO: 1114 - RNA, 20 nt, synthetic construct
  misc_feature 1..20: note = HBV-targeting guide sequence portion
  source 1..20: mol_type = other RNA
agggcaagtatttggtgaat

SEQ ID NO: 1115 - RNA, 20 nt, synthetic construct
  misc_feature 1..20: note = HBV-targeting guide sequence portion
  source 1..20: mol_type = other RNA
agggcataatgcaaaccttg

SEQ ID NO: 1116 - RNA, 20 nt, synthetic construct
  misc_feature 1..20: note = HBV-targeting guide sequence portion
  source 1..20: mol_type = other RNA
agggcatggacattgaccca

SEQ ID NO: 1117 - RNA, 20 nt, synthetic construct
  misc_feature 1..20: note = HBV-targeting guide sequence portion
  source 1..20: mol_type = other RNA
agggcattaaagcaggataa

SEQ ID NO: 1118 - RNA, 20 nt, synthetic construct
  misc_feature 1..20: note = HBV-targeting guide sequence portion
  source 1..20: mol_type = other RNA
agggccccaagcggcctcga

SEQ ID NO: 1119 - RNA, 20 nt, synthetic construct
  misc_feature 1..20: note = HBV-targeting guide sequence portion
  source 1..20: mol_type = other RNA
agggctccaccccaaaaggc

SEQ ID NO: 1120 - RNA, 20 nt, synthetic construct
  misc_feature 1..20: note = HBV-targeting guide sequence portion
  source 1..20: mol_type = other RNA
agggctttcccccactgttt

SEQ ID NO: 1121 - RNA, 20 nt, synthetic construct
  misc_feature 1..20: note = HBV-targeting guide sequence portion
  source 1..20: mol_type = other RNA
aggggacctgcctcgtcgtc

SEQ ID NO: 1122 - RNA, 20 nt, synthetic construct
  misc_feature 1..20: note = HBV-targeting guide sequence portion
  source 1..20: mol_type = other RNA
aggggcagcaaaacccagaa

SEQ ID NO: 1123 - RNA, 20 nt, synthetic construct
  misc_feature 1..20: note = HBV-targeting guide sequence portion
  source 1..20: mol_type = other RNA
aggggcatttggtggtctat

SEQ ID NO: 1124 - RNA, 20 nt, synthetic construct
  misc_feature 1..20: note = HBV-targeting guide sequence portion
  source 1..20: mol_type = other RNA
agggggaactaccgtgtgtc

SEQ ID NO: 1125 - RNA, 20 nt, synthetic construct
  misc_feature 1..20: note = HBV-targeting guide sequence portion
  source 1..20: mol_type = other RNA
aggggtcctaggaatcctga

SEQ ID NO: 1126 - RNA, 20 nt, synthetic construct
  misc_feature 1..20: note = HBV-targeting guide sequence portion
  source 1..20: mol_type = other RNA
agggtattaaaccttattat

SEQ ID NO: 1127 - RNA, 20 nt, synthetic construct
  misc_feature 1..20: note = HBV-targeting guide sequence portion
  source 1..20: mol_type = other RNA
agggtccccaatcctcgaga

SEQ ID NO: 1128 - RNA, 20 nt, synthetic construct
  misc_feature 1..20: note = HBV-targeting guide sequence portion
  source 1..20: mol_type = other RNA
agggtcccgtgctggtggtt

SEQ ID NO: 1129 - RNA, 20 nt, synthetic construct
  misc_feature 1..20: note = HBV-targeting guide sequence portion
  source 1..20: mol_type = other RNA
agggtgttttccaatgaggg

SEQ ID NO: 1130 - RNA, 20 nt, synthetic construct
  misc_feature 1..20: note = HBV-targeting guide sequence portion
  source 1..20: mol_type = other RNA
agggttaaagacaggtacag

SEQ ID NO: 1131 - RNA, 20 nt, synthetic construct
  misc_feature 1..20: note = HBV-targeting guide sequence portion
  source 1..20: mol_type = other RNA
agggttcaccccaccgcacg

SEQ ID NO: 1132 - RNA, 20 nt, synthetic construct
  misc_feature 1..20: note = HBV-targeting guide sequence portion
  source 1..20: mol_type = other RNA
agggtttaaatgtacaccca

SEQ ID NO: 1133 - RNA, 20 nt, synthetic construct
  misc_feature 1..20: note = HBV-targeting guide sequence portion
  source 1..20: mol_type = other RNA
agggtttactgttcctgaac

SEQ ID NO: 1134 - RNA, 20 nt, synthetic construct
  misc_feature 1..20: note = HBV-targeting guide sequence portion
  source 1..20: mol_type = other RNA
aggtacagtagaagaataaa

SEQ ID NO: 1135 - RNA, 20 nt, synthetic construct
  misc_feature 1..20: note = HBV-targeting guide sequence portion
  source 1..20: mol_type = other RNA
aggtagctagagtcattagt

SEQ ID NO: 1136 - RNA, 20 nt, synthetic construct
  misc_feature 1..20: note = HBV-targeting guide sequence portion
  source 1..20: mol_type = other RNA
aggtaggagctggagcattc

SEQ ID NO: 1137 - RNA, 20 nt, synthetic construct
  misc_feature 1..20: note = HBV-targeting guide sequence portion
  source 1..20: mol_type = other RNA
aggtatgtttcccgtctgtc

SEQ ID NO: 1138 - RNA, 20 nt, synthetic construct
  misc_feature 1..20: note = HBV-targeting guide sequence portion
  source 1..20: mol_type = other RNA
aggtattgtttacacagaaa

SEQ ID NO: 1139 - RNA, 20 nt, synthetic construct
  misc_feature 1..20: note = HBV-targeting guide sequence portion
  source 1..20: mol_type = other RNA
aggtcccctagaagaagaac

SEQ ID NO: 1140 - RNA, 20 nt, synthetic construct
  misc_feature 1..20: note = HBV-targeting guide sequence portion
  source 1..20: mol_type = other RNA
aggtccctagatgcttgatc

SEQ ID NO: 1141 - RNA, 20 nt, synthetic construct
  misc_feature 1..20: note = HBV-targeting guide sequence portion
  source 1..20: mol_type = other RNA
aggtcggtcgttgacattgc

SEQ ID NO: 1142 - RNA, 20 nt, synthetic construct
  misc_feature 1..20: note = HBV-targeting guide sequence portion
  source 1..20: mol_type = other RNA
aggtctgtgccaagtgtttg

SEQ ID NO: 1143 - RNA, 20 nt, synthetic construct
  misc_feature 1..20: note = HBV-targeting guide sequence portion
  source 1..20: mol_type = other RNA
aggtcttacataagaggact

SEQ ID NO: 1144 - RNA, 20 nt, synthetic construct
  misc_feature 1..20: note = HBV-targeting guide sequence portion
  source 1..20: mol_type = other RNA
aggtgaaaaagttgcatggt

SEQ ID NO: 1145 - RNA, 20 nt, synthetic construct
  misc_feature 1..20: note = HBV-targeting guide sequence portion
  source 1..20: mol_type = other RNA
aggtgaacaatgctcaggag

SEQ ID NO: 1146 - RNA, 20 nt, synthetic construct
  misc_feature 1..20: note = HBV-targeting guide sequence portion
  source 1..20: mol_type = other RNA
aggtgaagcgaagtgcacac

SEQ ID NO: 1147 - RNA, 20 nt, synthetic construct
  misc_feature 1..20: note = HBV-targeting guide sequence portion
  source 1..20: mol_type = other RNA
aggtgcagtttccatccgaa

SEQ ID NO: 1148 - RNA, 20 nt, synthetic construct
  misc_feature 1..20: note = HBV-targeting guide sequence portion
  source 1..20: mol_type = other RNA
aggtgcgccccgtggtcggt

SEQ ID NO: 1149 - RNA, 20 nt, synthetic construct
  misc_feature 1..20: note = HBV-targeting guide sequence portion
  source 1..20: mol_type = other RNA
aggtggagacagcggggtag

SEQ ID NO: 1150 - RNA, 20 nt, synthetic construct
  misc_feature 1..20: note = HBV-targeting guide sequence portion
  source 1..20: mol_type = other RNA
aggtgggaaattttacgggg

SEQ ID NO: 1151 - RNA, 20 nt, synthetic construct
  misc_feature 1..20: note = HBV-targeting guide sequence portion
  source 1..20: mol_type = other RNA
aggttcaggtattgtttaca

SEQ ID NO: 1152 - RNA, 20 nt, synthetic construct
  misc_feature 1..20: note = HBV-targeting guide sequence portion
  source 1..20: mol_type = other RNA
aggttccacgcatgcgctga

SEQ ID NO: 1153 - RNA, 20 nt, synthetic construct
  misc_feature 1..20: note = HBV-targeting guide sequence portion
  source 1..20: mol_type = other RNA
aggttccttgagcaggagtc

SEQ ID NO: 1154 - RNA, 20 nt, synthetic construct
  misc_feature 1..20: note = HBV-targeting guide sequence portion
  source 1..20: mol_type = other RNA
aggttctgcagggtcccgtg

SEQ ID NO: 1155 - RNA, 20 nt, synthetic construct
  misc_feature 1..20: note = HBV-targeting guide sequence portion
  source 1..20: mol_type = other RNA
aggttggggactgcgaattt

SEQ ID NO: 1156 - RNA, 20 nt, synthetic construct
  misc_feature 1..20: note = HBV-targeting guide sequence portion
  source 1..20: mol_type = other RNA
aggttggtgagtgattggag

SEQ ID NO: 1157 - RNA, 20 nt, synthetic construct
  misc_feature 1..20: note = HBV-targeting guide sequence portion
  source 1..20: mol_type = other RNA
aggtttaatacccttatcca

SEQ ID NO: 1158 - RNA, 20 nt, synthetic construct
  misc_feature 1..20: note = HBV-targeting guide sequence portion
  source 1..20: mol_type = other RNA
aggtttgcattatgccctga

SEQ ID NO: 1159 - RNA, 20 nt, synthetic construct
  misc_feature 1..20: note = HBV-targeting guide sequence portion
  source 1..20: mol_type = other RNA
aggttttatcctaaattcac

SEQ ID NO: 1160 - RNA, 20 nt, synthetic construct
  misc_feature 1..20: note = HBV-targeting guide sequence portion
  source 1..20: mol_type = other RNA
aggttttgtacagcaacagg

SEQ ID NO: 1161 - RNA, 20 nt, synthetic construct
  misc_feature 1..20: note = HBV-targeting guide sequence portion
  source 1..20: mol_type = other RNA
agtaaaccctgttccgacta

SEQ ID NO: 1162 - RNA, 20 nt, synthetic construct
  misc_feature 1..20: note = HBV-targeting guide sequence portion
  source 1..20: mol_type = other RNA
agtaaactgagccaagagaa

SEQ ID NO: 1163 - RNA, 20 nt, synthetic construct
  misc_feature 1..20: note = HBV-targeting guide sequence portion
  source 1..20: mol_type = other RNA
agtaactccacagtagctcc

SEQ ID NO: 1164 - RNA, 20 nt, synthetic construct
  misc_feature 1..20: note = HBV-targeting guide sequence portion
  source 1..20: mol_type = other RNA
agtaagacaagaaatgtgaa

SEQ ID NO: 1165 - RNA, 20 nt, synthetic construct
  misc_feature 1..20: note = HBV-targeting guide sequence portion
  source 1..20: mol_type = other RNA
agtaatgattaactagatgt

SEQ ID NO: 1166 - RNA, 20 nt, synthetic construct
  misc_feature 1..20: note = HBV-targeting guide sequence portion
  source 1..20: mol_type = other RNA
agtacaaagatcattaatct

SEQ ID NO: 1167 - RNA, 20 nt, synthetic construct
  misc_feature 1..20: note = HBV-targeting guide sequence portion
  source 1..20: mol_type = other RNA
agtacccacccaggtagcta

SEQ ID NO: 1168 - RNA, 20 nt, synthetic construct
  misc_feature 1..20: note = HBV-targeting guide sequence portion
  source 1..20: mol_type = other RNA
agtagaagaataaagccccg

SEQ ID NO: 1169 - RNA, 20 nt, synthetic construct
  misc_feature 1..20: note = HBV-targeting guide sequence portion
  source 1..20: mol_type = other RNA
agtagctccaaattctttat

SEQ ID NO: 1170 - RNA, 20 nt, synthetic construct
  misc_feature 1..20: note = HBV-targeting guide sequence portion
  source 1..20: mol_type = other RNA
agtaggacatgaacaagaga

SEQ ID NO: 1171 - RNA, 20 nt, synthetic construct
  misc_feature 1..20: note = HBV-targeting guide sequence portion
  source 1..20: mol_type = other RNA
agtagtcagttatgtcaaca

SEQ ID NO: 1172 - RNA, 20 nt, synthetic construct
  misc_feature 1..20: note = HBV-targeting guide sequence portion
  source 1..20: mol_type = other RNA
agtagtcggaacagggttta

SEQ ID NO: 1173 - RNA, 20 nt, synthetic construct
  misc_feature 1..20: note = HBV-targeting guide sequence portion
  source 1..20: mol_type = other RNA
agtatcccttggactcataa

SEQ ID NO: 1174 - RNA, 20 nt, synthetic construct
  misc_feature 1..20: note = HBV-targeting guide sequence portion
  source 1..20: mol_type = other RNA
agtatgcctcaaggtcggtc

SEQ ID NO: 1175 - RNA, 20 nt, synthetic construct
  misc_feature 1..20: note = HBV-targeting guide sequence portion
  source 1..20: mol_type = other RNA
agtatggatcggcagaggag

SEQ ID NO: 1176 - RNA, 20 nt, synthetic construct
  misc_feature 1..20: note = HBV-targeting guide sequence portion
  source 1..20: mol_type = other RNA
agtatggtgaggtgaacaat

SEQ ID NO: 1177 - RNA, 20 nt, synthetic construct
  misc_feature 1..20: note = HBV-targeting guide sequence portion
  source 1..20: mol_type = other RNA
agtatttggtgaatttagga

SEQ ID NO: 1178 - RNA, 20 nt, synthetic construct
  misc_feature 1..20: note = HBV-targeting guide sequence portion
  source 1..20: mol_type = other RNA
agtatttggtgtcttttgga

SEQ ID NO: 1179 - RNA, 20 nt, synthetic construct
  misc_feature 1..20: note = HBV-targeting guide sequence portion
  source 1..20: mol_type = other RNA
agtcagaaggcaaaaacgag

SEQ ID NO: 1180 - RNA, 20 nt, synthetic construct
  misc_feature 1..20: note = HBV-targeting guide sequence portion
  source 1..20: mol_type = other RNA
agtcaggacggcagcctacc

SEQ ID NO: 1181 - RNA, 20 nt, synthetic construct
  misc_feature 1..20: note = HBV-targeting guide sequence portion
  source 1..20: mol_type = other RNA
agtcagttatgtcaacactc

SEQ ID NO: 1182 - RNA, 20 nt, synthetic construct
  misc_feature 1..20: note = HBV-targeting guide sequence portion
  source 1..20: mol_type = other RNA
agtcattagttctccccagc

SEQ ID NO: 1183 - RNA, 20 nt, synthetic construct
  misc_feature 1..20: note = HBV-targeting guide sequence portion
  source 1..20: mol_type = other RNA
agtccaagagtcctcttatg

SEQ ID NO: 1184 - RNA, 20 nt, synthetic construct
  misc_feature 1..20: note = HBV-targeting guide sequence portion
  source 1..20: mol_type = other RNA
agtccaagggatactaacat

SEQ ID NO: 1185 - RNA, 20 nt, synthetic construct
  misc_feature 1..20: note = HBV-targeting guide sequence portion
  source 1..20: mol_type = other RNA
agtccaccacgagtctagac

SEQ ID NO: 1186 - RNA, 20 nt, synthetic construct
  misc_feature 1..20: note = HBV-targeting guide sequence portion
  source 1..20: mol_type = other RNA
agtccagaagaaccaacaag

SEQ ID NO: 1187 - RNA, 20 nt, synthetic construct
  misc_feature 1..20: note = HBV-targeting guide sequence portion
  source 1..20: mol_type = other RNA
agtcccaatctggattgttg

SEQ ID NO: 1188 - RNA, 20 nt, synthetic construct
  misc_feature 1..20: note = HBV-targeting guide sequence portion
  source 1..20: mol_type = other RNA
agtccccaacctccaatcac

SEQ ID NO: 1189 - RNA, 20 nt, synthetic construct
  misc_feature 1..20: note = HBV-targeting guide sequence portion
  source 1..20: mol_type = other RNA
agtcccgagaatgtttgctc

SEQ ID NO: 1190 - RNA, 20 nt, synthetic construct
  misc_feature 1..20: note = HBV-targeting guide sequence portion
  source 1..20: mol_type = other RNA
agtccctttataccgctgtt

SEQ ID NO: 1191 - RNA, 20 nt, synthetic construct
  misc_feature 1..20: note = HBV-targeting guide sequence portion
  source 1..20: mol_type = other RNA
agtccgcgtaaagagaggtg

SEQ ID NO: 1192 - RNA, 20 nt, synthetic construct
  misc_feature 1..20: note = HBV-targeting guide sequence portion
  source 1..20: mol_type = other RNA
agtcctcttatgtaagacct

SEQ ID NO: 1193 - RNA, 20 nt, synthetic construct
  misc_feature 1..20: note = HBV-targeting guide sequence portion
  source 1..20: mol_type = other RNA
agtcggaacagggtttactg

SEQ ID NO: 1194 - RNA, 20 nt, synthetic construct
  misc_feature 1..20: note = HBV-targeting guide sequence portion
  source 1..20: mol_type = other RNA
agtcgtgcaggttctgcagg

SEQ ID NO: 1195 - RNA, 20 nt, synthetic construct
  misc_feature 1..20: note = HBV-targeting guide sequence portion
  source 1..20: mol_type = other RNA
agtctagactcgtggtggac

SEQ ID NO: 1196 - RNA, 20 nt, synthetic construct
  misc_feature 1..20: note = HBV-targeting guide sequence portion
  source 1..20: mol_type = other RNA
agtctagactctgcggtatt

SEQ ID NO: 1197 - RNA, 20 nt, synthetic construct
  misc_feature 1..20: note = HBV-targeting guide sequence portion
  source 1..20: mol_type = other RNA
agtctccggaagtgttgata

SEQ ID NO: 1198 - RNA, 20 nt, synthetic construct
  misc_feature 1..20: note = HBV-targeting guide sequence portion
  source 1..20: mol_type = other RNA
agtctcctgagcattgttca

SEQ ID NO: 1199 - RNA, 20 nt, synthetic construct
  misc_feature 1..20: note = HBV-targeting guide sequence portion
  source 1..20: mol_type = other RNA
agtctgtacagcatcttgag

SEQ ID NO: 1200 - RNA, 20 nt, synthetic construct
  misc_feature 1..20: note = HBV-targeting guide sequence portion
  source 1..20: mol_type = other RNA
agtctttaaacaaacagtct

SEQ ID NO: 1201 - RNA, 20 nt, synthetic construct
  misc_feature 1..20: note = HBV-targeting guide sequence portion
  source 1..20: mol_type = other RNA
agtctttgaagtatgcctca

SEQ ID NO: 1202 - RNA, 20 nt, synthetic construct
  misc_feature 1..20: note = HBV-targeting guide sequence portion
  source 1..20: mol_type = other RNA
agtgaaagcctgcttagatt

SEQ ID NO: 1203 - RNA, 20 nt, synthetic construct
  misc_feature 1..20: note = HBV-targeting guide sequence portion
  source 1..20: mol_type = other RNA
agtgagaggcctgtatctcc

SEQ ID NO: 1204 - RNA, 20 nt, synthetic construct
  misc_feature 1..20: note = HBV-targeting guide sequence portion
  source 1..20: mol_type = other RNA
agtgattggaggttggggac

SEQ ID NO: 1205 - RNA, 20 nt, synthetic construct
  misc_feature 1..20: note = HBV-targeting guide sequence portion
  source 1..20: mol_type = other RNA
agtgcacacggtccggcaga

SEQ ID NO: 1206 - RNA, 20 nt, synthetic construct
  misc_feature 1..20: note = HBV-targeting guide sequence portion
  source 1..20: mol_type = other RNA
agtgcagtatggtgaggtga

SEQ ID NO: 1207 - RNA, 20 nt, synthetic construct
  misc_feature 1..20: note = HBV-targeting guide sequence portion
  source 1..20: mol_type = other RNA
agtgccatttgttcagtggt

SEQ ID NO: 1208 - RNA, 20 nt, synthetic construct
  misc_feature 1..20: note = HBV-targeting guide sequence portion
  source 1..20: mol_type = other RNA
agtgcgaatccacactccaa

SEQ ID NO: 1209 - RNA, 20 nt, synthetic construct
  misc_feature 1..20: note = HBV-targeting guide sequence portion
  source 1..20: mol_type = other RNA
agtgggcctcagcccgtttc

SEQ ID NO: 1210 - RNA, 20 nt, synthetic construct
  misc_feature 1..20: note = HBV-targeting guide sequence portion
  source 1..20: mol_type = other RNA
agtgggggaaagccctacga

SEQ ID NO: 1211 - RNA, 20 nt, synthetic construct
  misc_feature 1..20: note = HBV-targeting guide sequence portion
  source 1..20: mol_type = other RNA
agtgggggttgcatcagcaa

SEQ ID NO: 1212 - RNA, 20 nt, synthetic construct
  misc_feature 1..20: note = HBV-targeting guide sequence portion
  source 1..20: mol_type = other RNA
agtggttcgtagggctttcc

SEQ ID NO: 1213 - RNA, 20 nt, synthetic construct
  misc_feature 1..20: note = HBV-targeting guide sequence portion
  source 1..20: mol_type = other RNA
agtgtcaacacatagcgcct

SEQ ID NO: 1214 - RNA, 20 nt, synthetic construct
  misc_feature 1..20: note = HBV-targeting guide sequence portion
  source 1..20: mol_type = other RNA
agtgtctagtttggaagtaa

SEQ ID NO: 1215 - RNA, 20 nt, synthetic construct
  misc_feature 1..20: note = HBV-targeting guide sequence portion
  source 1..20: mol_type = other RNA
agtgtggattcgcactcctc

SEQ ID NO: 1216 - RNA, 20 nt, synthetic construct
  misc_feature 1..20: note = HBV-targeting guide sequence portion
  source 1..20: mol_type = other RNA
agtgtgtaaatagtgtctag

SEQ ID NO: 1217 - RNA, 20 nt, synthetic construct
  misc_feature 1..20: note = HBV-targeting guide sequence portion
  source 1..20: mol_type = other RNA
agtgtgtcaacgaattgtgg

SEQ ID NO: 1218 - RNA, 20 nt, synthetic construct
  misc_feature 1..20: note = HBV-targeting guide sequence portion
  source 1..20: mol_type = other RNA
agtgttgacataactgacta

SEQ ID NO: 1219 - RNA, 20 nt, synthetic construct
  misc_feature 1..20: note = HBV-targeting guide sequence portion
  source 1..20: mol_type = other RNA
agtgttgataggataggggc

SEQ ID NO: 1220 - RNA, 20 nt, synthetic construct
  misc_feature 1..20: note = HBV-targeting guide sequence portion
  source 1..20: mol_type = other RNA
agtgtttctcagaggtggag

SEQ ID NO: 1221 - RNA, 20 nt, synthetic construct
  misc_feature 1..20: note = HBV-targeting guide sequence portion
  source 1..20: mol_type = other RNA
agtgtttgctgatgcaaccc

SEQ ID NO: 1222 - RNA, 20 nt, synthetic construct
  misc_feature 1..20: note = HBV-targeting guide sequence portion
  source 1..20: mol_type = other RNA
agttaatcattacttccaaa

SEQ ID NO: 1223 - RNA, 20 nt, synthetic construct
  misc_feature 1..20: note = HBV-targeting guide sequence portion
  source 1..20: mol_type = other RNA
agttaatgagaaaagacggt

SEQ ID NO: 1224 - RNA, 20 nt, synthetic construct
  misc_feature 1..20: note = HBV-targeting guide sequence portion
  source 1..20: mol_type = other RNA
agttactctcgtttttgcct

SEQ ID NO: 1225 - RNA, 20 nt, synthetic construct
  misc_feature 1..20: note = HBV-targeting guide sequence portion
  source 1..20: mol_type = other RNA
agttatatggatgatgtggt

SEQ ID NO: 1226 - RNA, 20 nt, synthetic construct
  misc_feature 1..20: note = HBV-targeting guide sequence portion
  source 1..20: mol_type = other RNA
agttatgtcaacactcatat

SEQ ID NO: 1227 - RNA, 20 nt, synthetic construct
  misc_feature 1..20: note = HBV-targeting guide sequence portion
  source 1..20: mol_type = other RNA
agttcagacaactattgtgg

SEQ ID NO: 1228 - RNA, 20 nt, synthetic construct
  misc_feature 1..20: note = HBV-targeting guide sequence portion
  source 1..20: mol_type = other RNA
agttcaggaacagtaaaccc

SEQ ID NO: 1229 - RNA, 20 nt, synthetic construct
  misc_feature 1..20: note = HBV-targeting guide sequence portion
  source 1..20: mol_type = other RNA
agttccccctagaaaattga

SEQ ID NO: 1230 - RNA, 20 nt, synthetic construct
  misc_feature 1..20: note = HBV-targeting guide sequence portion
  source 1..20: mol_type = other RNA
agttccgcagtatggatcgg

SEQ ID NO: 1231 - RNA, 20 nt, synthetic construct
  misc_feature 1..20: note = HBV-targeting guide sequence portion
  source 1..20: mol_type = other RNA
agttctccccagcaaagaat

SEQ ID NO: 1232 - RNA, 20 nt, synthetic construct
  misc_feature 1..20: note = HBV-targeting guide sequence portion
  source 1..20: mol_type = other RNA
agttcttcttctaggggacc

SEQ ID NO: 1233 - RNA, 20 nt, synthetic construct
  misc_feature 1..20: note = HBV-targeting guide sequence portion
  source 1..20: mol_type = other RNA
agttgcatggtgctggtgcg

SEQ ID NO: 1234 - RNA, 20 nt, synthetic construct
  misc_feature 1..20: note = HBV-targeting guide sequence portion
  source 1..20: mol_type = other RNA
agttggacccagccttcaga

SEQ ID NO: 1235 - RNA, 20 nt, synthetic construct
  misc_feature 1..20: note = HBV-targeting guide sequence portion
  source 1..20: mol_type = other RNA
agttggaggacaggaggttg

SEQ ID NO: 1236 - RNA, 20 nt, synthetic construct
  misc_feature 1..20: note = HBV-targeting guide sequence portion
  source 1..20: mol_type = other RNA
agttggcagcacagcctagc

SEQ ID NO: 1237 - RNA, 20 nt, synthetic construct
  misc_feature 1..20: note = HBV-targeting guide sequence portion
  source 1..20: mol_type = other RNA
agttggcgaaaaagtgaaag

SEQ ID NO: 1238 - RNA, 20 nt, synthetic construct
  misc_feature 1..20: note = HBV-targeting guide sequence portion
  source 1..20: mol_type = other RNA
agttgggggaggagattaga

SEQ ID NO: 1239 - RNA, 20 nt, synthetic construct
  misc_feature 1..20: note = HBV-targeting guide sequence portion
  source 1..20: mol_type = other RNA
agttgtcagtcccgagaatg

SEQ ID NO: 1240 - RNA, 20 nt, synthetic construct
  misc_feature 1..20: note = HBV-targeting guide sequence portion
  source 1..20: mol_type = other RNA
agttgtctgaactttaggcc

SEQ ID NO: 1241 - RNA, 20 nt, synthetic construct
  misc_feature 1..20: note = HBV-targeting guide sequence portion
  source 1..20: mol_type = other RNA
agtttactagtgccatttgt

SEQ ID NO: 1242 - RNA, 20 nt, synthetic construct
  misc_feature 1..20: note = HBV-targeting guide sequence portion
  source 1..20: mol_type = other RNA
agtttccatccgaaggtttt

SEQ ID NO: 1243 - RNA, 20 nt, synthetic construct
  misc_feature 1..20: note = HBV-targeting guide sequence portion
  source 1..20: mol_type = other RNA
agtttgctctgaaggctggg

SEQ ID NO: 1244 - RNA, 20 nt, synthetic construct
  misc_feature 1..20: note = HBV-targeting guide sequence portion
  source 1..20: mol_type = other RNA
agtttggaagtaatgattaa

SEQ ID NO: 1245 - RNA, 20 nt, synthetic construct
  misc_feature 1..20: note = HBV-targeting guide sequence portion
  source 1..20: mol_type = other RNA
agtttgtaggcccgcttaca

SEQ ID NO: 1246 - RNA, 20 nt, synthetic construct
  misc_feature 1..20: note = HBV-targeting guide sequence portion
  source 1..20: mol_type = other RNA
agttttctgaaacattcttt

SEQ ID NO: 1247 - RNA, 20 nt, synthetic construct
  misc_feature 1..20: note = HBV-targeting guide sequence portion
  source 1..20: mol_type = other RNA
ataaaacacccgccttccat

SEQ ID NO: 1248 - RNA, 20 nt, synthetic construct
  misc_feature 1..20: note = HBV-targeting guide sequence portion
  source 1..20: mol_type = other RNA
ataaaacctagcaggcataa

SEQ ID NO: 1249 - RNA, 20 nt, synthetic construct
  misc_feature 1..20: note = HBV-targeting guide sequence portion
  source 1..20: mol_type = other RNA
ataaaacgccgcagacacat

SEQ ID NO: 1250 - RNA, 20 nt, synthetic construct
  misc_feature 1..20: note = HBV-targeting guide sequence portion
  source 1..20: mol_type = other RNA
ataaagaatttggagctact

SEQ ID NO: 1251 - RNA, 20 nt, synthetic construct
  misc_feature 1..20: note = HBV-targeting guide sequence portion
  source 1..20: mol_type = other RNA
ataaagccccgtaaaatttc

SEQ ID NO: 1252 - RNA, 20 nt, synthetic construct
  misc_feature 1..20: note = HBV-targeting guide sequence portion
  source 1..20: mol_type = other RNA
ataaagggactcaagatgct

SEQ ID NO: 1253 - RNA, 20 nt, synthetic construct
  misc_feature 1..20: note = HBV-targeting guide sequence portion
  source 1..20: mol_type = other RNA
ataaattggtctgcgcacca

SEQ ID NO: 1254 - RNA, 20 nt, synthetic construct
  misc_feature 1..20: note = HBV-targeting guide sequence portion
  source 1..20: mol_type = other RNA
ataaccacattgtgtaaaag

SEQ ID NO: 1255 - RNA, 20 nt, synthetic construct
  misc_feature 1..20: note = HBV-targeting guide sequence portion
  source 1..20: mol_type = other RNA
ataaccaggacaagttggag

SEQ ID NO: 1256 - RNA, 20 nt, synthetic construct
  misc_feature 1..20: note = HBV-targeting guide sequence portion
  source 1..20: mol_type = other RNA
ataaccccatctctttgttt

SEQ ID NO: 1257 - RNA, 20 nt, synthetic construct
  misc_feature 1..20: note = HBV-targeting guide sequence portion
  source 1..20: mol_type = other RNA
ataactgaaagccaaacagt

SEQ ID NO: 1258 - RNA, 20 nt, synthetic construct
  misc_feature 1..20: note = HBV-targeting guide sequence portion
  source 1..20: mol_type = other RNA
ataactgactactaggtccc

SEQ ID NO: 1259 - RNA, 20 nt, synthetic construct
  misc_feature 1..20: note = HBV-targeting guide sequence portion
  source 1..20: mol_type = other RNA
ataagagagtgtcaacacat

SEQ ID NO: 1260 - RNA, 20 nt, synthetic construct
  misc_feature 1..20: note = HBV-targeting guide sequence portion
  source 1..20: mol_type = other RNA
ataagaggactcttggactc

SEQ ID NO: 1261 - RNA, 20 nt, synthetic construct
  misc_feature 1..20: note = HBV-targeting guide sequence portion
  source 1..20: mol_type = other RNA
ataagctggaggagtgcgaa

SEQ ID NO: 1262 - RNA, 20 nt, synthetic construct
  misc_feature 1..20: note = HBV-targeting guide sequence portion
  source 1..20: mol_type = other RNA
ataagggtattaaaccttat

SEQ ID NO: 1263 - RNA, 20 nt, synthetic construct
  misc_feature 1..20: note = HBV-targeting guide sequence portion
  source 1..20: mol_type = other RNA
ataaggtgggaaattttacg

SEQ ID NO: 1264 - RNA, 20 nt, synthetic construct
  misc_feature 1..20: note = HBV-targeting guide sequence portion
  source 1..20: mol_type = other RNA
ataaggtttaatacccttat

SEQ ID NO: 1265 - RNA, 20 nt, synthetic construct
  misc_feature 1..20: note = HBV-targeting guide sequence portion
  source 1..20: mol_type = other RNA
ataataaggtttaataccct

SEQ ID NO: 1266 - RNA, 20 nt, synthetic construct
  misc_feature 1..20: note = HBV-targeting guide sequence portion
  source 1..20: mol_type = other RNA
ataatatcttggtgtagatg

SEQ ID NO: 1267 - RNA, 20 nt, synthetic construct
  misc_feature 1..20: note = HBV-targeting guide sequence portion
  source 1..20: mol_type = other RNA
ataatcaatttcaaccgtct

SEQ ID NO: 1268 - RNA, 20 nt, synthetic construct
  misc_feature 1..20: note = HBV-targeting guide sequence portion
  source 1..20: mol_type = other RNA
ataatgcaaaccttgccagc

SEQ ID NO: 1269 - RNA, 20 nt, synthetic construct
  misc_feature 1..20: note = HBV-targeting guide sequence portion
  source 1..20: mol_type = other RNA
atacaagggcattaaagcag

SEQ ID NO: 1270 - RNA, 20 nt, synthetic construct
  misc_feature 1..20: note = HBV-targeting guide sequence portion
  source 1..20: mol_type = other RNA
atacacaaaatcaaagaatg

SEQ ID NO: 1271 - RNA, 20 nt, synthetic construct
  misc_feature 1..20: note = HBV-targeting guide sequence portion
  source 1..20: mol_type = other RNA
atacagagctgcggcggtat

SEQ ID NO: 1272 - RNA, 20 nt, synthetic construct
  misc_feature 1..20: note = HBV-targeting guide sequence portion
  source 1..20: mol_type = other RNA
atacaggcctctcactctgg

SEQ ID NO: 1273 - RNA, 20 nt, synthetic construct
  misc_feature 1..20: note = HBV-targeting guide sequence portion
  source 1..20: mol_type = other RNA
atacaggtgcagtttccatc

SEQ ID NO: 1274 - RNA, 20 nt, synthetic construct
  misc_feature 1..20: note = HBV-targeting guide sequence portion
  source 1..20: mol_type = other RNA
atacatagaggttccttgag

SEQ ID NO: 1275 - RNA, 20 nt, synthetic construct
  misc_feature 1..20: note = HBV-targeting guide sequence portion
  source 1..20: mol_type = other RNA
atacatcgttcccatggctg

SEQ ID NO: 1276 - RNA, 20 nt, synthetic construct
  misc_feature 1..20: note = HBV-targeting guide sequence portion
  source 1..20: mol_type = other RNA
atacatctacaccaagatat

SEQ ID NO: 1277 - RNA, 20 nt, synthetic construct
  misc_feature 1..20: note = HBV-targeting guide sequence portion
  source 1..20: mol_type = other RNA
atacatgcatacaagggcat

SEQ ID NO: 1278 - RNA, 20 nt, synthetic construct
  misc_feature 1..20: note = HBV-targeting guide sequence portion
  source 1..20: mol_type = other RNA
ataccacatcatccatataa

SEQ ID NO: 1279 - RNA, 20 nt, synthetic construct
  misc_feature 1..20: note = HBV-targeting guide sequence portion
  source 1..20: mol_type = other RNA
atacccttatccaagggcaa

SEQ ID NO: 1280 - RNA, 20 nt, synthetic construct
  misc_feature 1..20: note = HBV-targeting guide sequence portion
  source 1..20: mol_type = other RNA
ataccgcagagtctagactc

SEQ ID NO: 1281 - RNA, 20 nt, synthetic construct
  misc_feature 1..20: note = HBV-targeting guide sequence portion
  source 1..20: mol_type = other RNA
ataccgccgcagctctgtat

SEQ ID NO: 1282 - RNA, 20 nt, synthetic construct
  misc_feature 1..20: note = HBV-targeting guide sequence portion
  source 1..20: mol_type = other RNA
ataccgctgttaccaatttt

SEQ ID NO: 1283 - RNA, 20 nt, synthetic construct
  misc_feature 1..20: note = HBV-targeting guide sequence portion
  source 1..20: mol_type = other RNA
atacctgaacctttaccccg

SEQ ID NO: 1284 - RNA, 20 nt, synthetic construct
  misc_feature 1..20: note = HBV-targeting guide sequence portion
  source 1..20: mol_type = other RNA
ataccttgatagtccagaag

SEQ ID NO: 1285 - RNA, 20 nt, synthetic construct
  misc_feature 1..20: note = HBV-targeting guide sequence portion
  source 1..20: mol_type = other RNA
atactaacattgagatcccc

SEQ ID NO: 1286 - RNA, 20 nt, synthetic construct
  misc_feature 1..20: note = HBV-targeting guide sequence portion
  source 1..20: mol_type = other RNA
atactctaggaccgtttctc

SEQ ID NO: 1287 - RNA, 20 nt, synthetic construct
  misc_feature 1..20: note = HBV-targeting guide sequence portion
  source 1..20: mol_type = other RNA
atactgcactcaggcaagca

SEQ ID NO: 1288 - RNA, 20 nt, synthetic construct
  misc_feature 1..20: note = HBV-targeting guide sequence portion
  source 1..20: mol_type = other RNA
atactgcggaactcctagcc

SEQ ID NO: 1289 - RNA, 20 nt, synthetic construct
  misc_feature 1..20: note = HBV-targeting guide sequence portion
  source 1..20: mol_type = other RNA
atacttcaaagactgtttgt

SEQ ID NO: 1290 - RNA, 20 nt, synthetic construct
  misc_feature 1..20: note = HBV-targeting guide sequence portion
  source 1..20: mol_type = other RNA
atacttgcccttggataagg

SEQ ID NO: 1291 - RNA, 20 nt, synthetic construct
  misc_feature 1..20: note = HBV-targeting guide sequence portion
  source 1..20: mol_type = other RNA
atagaccaccaaatgcccct

SEQ ID NO: 1292 - RNA, 20 nt, synthetic construct
  misc_feature 1..20: note = HBV-targeting guide sequence portion
  source 1..20: mol_type = other RNA
atagaggttccttgagcagg

SEQ ID NO: 1293 - RNA, 20 nt, synthetic construct
  misc_feature 1..20: note = HBV-targeting guide sequence portion
  source 1..20: mol_type = other RNA
atagagtgtgtaaatagtgt

SEQ ID NO: 1294 - RNA, 20 nt, synthetic construct
  misc_feature 1..20: note = HBV-targeting guide sequence portion
  source 1..20: mol_type = other RNA
atagcagcaggatgaagagg

SEQ ID NO: 1295 - RNA, 20 nt, synthetic construct
  misc_feature 1..20: note = HBV-targeting guide sequence portion
  source 1..20: mol_type = other RNA
atagcccatgaaattaagag

SEQ ID NO: 1296 - RNA, 20 nt, synthetic construct
  misc_feature 1..20: note = HBV-targeting guide sequence portion
  source 1..20: mol_type = other RNA
atagcgcctcattctgtggg

SEQ ID NO: 1297 - RNA, 20 nt, synthetic construct
  misc_feature 1..20: note = HBV-targeting guide sequence portion
  source 1..20: mol_type = other RNA
ataggaattttccgaaagcc

SEQ ID NO: 1298 - RNA, 20 nt, synthetic construct
  misc_feature 1..20: note = HBV-targeting guide sequence portion
  source 1..20: mol_type = other RNA
ataggataggggcatttggt

SEQ ID NO: 1299 - RNA, 20 nt, synthetic construct
  misc_feature 1..20: note = HBV-targeting guide sequence portion
  source 1..20: mol_type = other RNA
ataggccatcagcgcatgcg

SEQ ID NO: 1300 - RNA, 20 nt, synthetic construct
  misc_feature 1..20: note = HBV-targeting guide sequence portion
  source 1..20: mol_type = other RNA
ataggcctgttaaccgggag

SEQ ID NO: 1301 - RNA, 20 nt, synthetic construct
  misc_feature 1..20: note = HBV-targeting guide sequence portion
  source 1..20: mol_type = other RNA
ataggggcatttggtggtct

SEQ ID NO: 1302 - RNA, 20 nt, synthetic construct
  misc_feature 1..20: note = HBV-targeting guide sequence portion
  source 1..20: mol_type = other RNA
atagtccagaagaaccaaca

SEQ ID NO: 1303 - RNA, 20 nt, synthetic construct
  misc_feature 1..20: note = HBV-targeting guide sequence portion
  source 1..20: mol_type = other RNA
atagtgtctagtttggaagt

SEQ ID NO: 1304 - RNA, 20 nt, synthetic construct
  misc_feature 1..20: note = HBV-targeting guide sequence portion
  source 1..20: mol_type = other RNA
atagttgtctgaactttagg

SEQ ID NO: 1305 - RNA, 20 nt, synthetic construct
  misc_feature 1..20: note = HBV-targeting guide sequence portion
  source 1..20: mol_type = other RNA
atataaaacacccgccttcc

SEQ ID NO: 1306 - RNA, 20 nt, synthetic construct
  misc_feature 1..20: note = HBV-targeting guide sequence portion
  source 1..20: mol_type = other RNA
atataaagaatttggagcta

SEQ ID NO: 1307 - RNA, 20 nt, synthetic construct
  misc_feature 1..20: note = HBV-targeting guide sequence portion
  source 1..20: mol_type = other RNA
atataactgaaagccaaaca

SEQ ID NO: 1308 - RNA, 20 nt, synthetic construct
  misc_feature 1..20: note = HBV-targeting guide sequence portion
  source 1..20: mol_type = other RNA
atataagagagtgtcaacac

SEQ ID NO: 1309 - RNA, 20 nt, synthetic construct
  misc_feature 1..20: note = HBV-targeting guide sequence portion
  source 1..20: mol_type = other RNA
atatacatcgttcccatggc

SEQ ID NO: 1310 - RNA, 20 nt, synthetic construct
  misc_feature 1..20: note = HBV-targeting guide sequence portion
  source 1..20: mol_type = other RNA
atatacatctacaccaagat

SEQ ID NO: 1311 - RNA, 20 nt, synthetic construct
  misc_feature 1..20: note = HBV-targeting guide sequence portion
  source 1..20: mol_type = other RNA
atatcgtcaatcttctcgag

SEQ ID NO: 1312 - RNA, 20 nt, synthetic construct
  misc_feature 1..20: note = HBV-targeting guide sequence portion
  source 1..20: mol_type = other RNA
atatcttggtgtagatgtat

SEQ ID NO: 1313 - RNA, 20 nt, synthetic construct
  misc_feature 1..20: note = HBV-targeting guide sequence portion
  source 1..20: mol_type = other RNA
atatgagtgttgacataact

SEQ ID NO: 1314 - RNA, 20 nt, synthetic construct
  misc_feature 1..20: note = HBV-targeting guide sequence portion
  source 1..20: mol_type = other RNA
atatggatgatgtggtattg

SEQ ID NO: 1315 - RNA, 20 nt, synthetic construct
  misc_feature 1..20: note = HBV-targeting guide sequence portion
  source 1..20: mol_type = other RNA
atatgggcctaaagttcaga

SEQ ID NO: 1316 - RNA, 20 nt, synthetic construct
  misc_feature 1..20: note = HBV-targeting guide sequence portion
  source 1..20: mol_type = other RNA
atatgggtcaatgtccatgc

SEQ ID NO: 1317 - RNA, 20 nt, synthetic construct
  misc_feature 1..20: note = HBV-targeting guide sequence portion
  source 1..20: mol_type = other RNA
atatggtgacccacagaatg

SEQ ID NO: 1318 - RNA, 20 nt, synthetic construct
  misc_feature 1..20: note = HBV-targeting guide sequence portion
  source 1..20: mol_type = other RNA
atatgtgagaggcagtagtc

SEQ ID NO: 1319 - RNA, 20 nt, synthetic construct
  misc_feature 1..20: note = HBV-targeting guide sequence portion
  source 1..20: mol_type = other RNA
atattaggaaaagagggtgt

SEQ ID NO: 1320 - RNA, 20 nt, synthetic construct
  misc_feature 1..20: note = HBV-targeting guide sequence portion
  source 1..20: mol_type = other RNA
atattatcaaaaaatgtgaa

SEQ ID NO: 1321 - RNA, 20 nt, synthetic construct
  misc_feature 1..20: note = HBV-targeting guide sequence portion
  source 1..20: mol_type = other RNA
atattcttgggaacaagagc

SEQ ID NO: 1322 - RNA, 20 nt, synthetic construct
  misc_feature 1..20: note = HBV-targeting guide sequence portion
  source 1..20: mol_type = other RNA
atatttgcgggagaggacaa

SEQ ID NO: 1323 - RNA, 20 nt, synthetic construct
  misc_feature 1..20: note = HBV-targeting guide sequence portion
  source 1..20: mol_type = other RNA
atcaaaaaatgtgaacagtt

SEQ ID NO: 1324 - RNA, 20 nt, synthetic construct
  misc_feature 1..20: note = HBV-targeting guide sequence portion
  source 1..20: mol_type = other RNA
atcaaagaatgtttcagaaa

SEQ ID NO: 1325 - RNA, 20 nt, synthetic construct
  misc_feature 1..20: note = HBV-targeting guide sequence portion
  source 1..20: mol_type = other RNA
atcaacacttccggagactt

SEQ ID NO: 1326 - RNA, 20 nt, synthetic construct
  misc_feature 1..20: note = HBV-targeting guide sequence portion
  source 1..20: mol_type = other RNA
atcaaccaccagcacgggac

SEQ ID NO: 1327 - RNA, 20 nt, synthetic construct
  misc_feature 1..20: note = HBV-targeting guide sequence portion
  source 1..20: mol_type = other RNA
atcaagcatctagggaccta

SEQ ID NO: 1328 - RNA, 20 nt, synthetic construct
  misc_feature 1..20: note = HBV-targeting guide sequence portion
  source 1..20: mol_type = other RNA
atcaaggtatgtttcccgtc

SEQ ID NO: 1329 - RNA, 20 nt, synthetic construct
  misc_feature 1..20: note = HBV-targeting guide sequence portion
  source 1..20: mol_type = other RNA
atcaataggcctgttaaccg

SEQ ID NO: 1330 - RNA, 20 nt, synthetic construct
  misc_feature 1..20: note = HBV-targeting guide sequence portion
  source 1..20: mol_type = other RNA
atcaatgacatagcccatga

SEQ ID NO: 1331 - RNA, 20 nt, synthetic construct
  misc_feature 1..20: note = HBV-targeting guide sequence portion
  source 1..20: mol_type = other RNA
atcaatttcaaccgtctttt

SEQ ID NO: 1332 - RNA, 20 nt, synthetic construct
  misc_feature 1..20: note = HBV-targeting guide sequence portion
  source 1..20: mol_type = other RNA
atcacatcaggattcctagg

SEQ ID NO: 1333 - RNA, 20 nt, synthetic construct
  misc_feature 1..20: note = HBV-targeting guide sequence portion
  source 1..20: mol_type = other RNA
atcacatcatacacaaaatc

SEQ ID NO: 1334 - RNA, 20 nt, synthetic construct
  misc_feature 1..20: note = HBV-targeting guide sequence portion
  source 1..20: mol_type = other RNA
atcactcaccaacctcctgt

SEQ ID NO: 1335 - RNA, 20 nt, synthetic construct
  misc_feature 1..20: note = HBV-targeting guide sequence portion
  source 1..20: mol_type = other RNA
atcagcaaacacttggcaca

SEQ ID NO: 1336 - RNA, 20 nt, synthetic construct
  misc_feature 1..20: note = HBV-targeting guide sequence portion
  source 1..20: mol_type = other RNA
atcagcgcatgcgtggaacc

SEQ ID NO: 1337 - RNA, 20 nt, synthetic construct
  misc_feature 1..20: note = HBV-targeting guide sequence portion
  source 1..20: mol_type = other RNA
atcaggattcctaggacccc

SEQ ID NO: 1338 - RNA, 20 nt, synthetic construct
  misc_feature 1..20: note = HBV-targeting guide sequence portion
  source 1..20: mol_type = other RNA
atcatacacaaaatcaaaga

SEQ ID NO: 1339 - RNA, 20 nt, synthetic construct
  misc_feature 1..20: note = HBV-targeting guide sequence portion
  source 1..20: mol_type = other RNA
atcatcaaccaccagcacgg

SEQ ID NO: 1340 - RNA, 20 nt, synthetic construct
  misc_feature 1..20: note = HBV-targeting guide sequence portion
  source 1..20: mol_type = other RNA
atcatccatataactgaaag

SEQ ID NO: 1341 - RNA, 20 nt, synthetic construct
  misc_feature 1..20: note = HBV-targeting guide sequence portion
  source 1..20: mol_type = other RNA
atcatcctgggctttcggaa

SEQ ID NO: 1342 - RNA, 20 nt, synthetic construct
  misc_feature 1..20: note = HBV-targeting guide sequence portion
  source 1..20: mol_type = other RNA
atcatctcttgttcatgtcc

SEQ ID NO: 1343 - RNA, 20 nt, synthetic construct
  misc_feature 1..20: note = HBV-targeting guide sequence portion
  source 1..20: mol_type = other RNA
atcatcttcctcttcatcct

SEQ ID NO: 1344 - RNA, 20 nt, synthetic construct
  misc_feature 1..20: note = HBV-targeting guide sequence portion
  source 1..20: mol_type = other RNA
atcattaatctaatctcctc

SEQ ID NO: 1345 - RNA, 20 nt, synthetic construct
  misc_feature 1..20: note = HBV-targeting guide sequence portion
  source 1..20: mol_type = other RNA
atcattacttccaaactaga

SEQ ID NO: 1346 - RNA, 20 nt, synthetic construct
  misc_feature 1..20: note = HBV-targeting guide sequence portion
  source 1..20: mol_type = other RNA
atcattgccacaaaatcaca

SEQ ID NO: 1347 - RNA, 20 nt, synthetic construct
  misc_feature 1..20: note = HBV-targeting guide sequence portion
  source 1..20: mol_type = other RNA
atccaagggcaagtatttgg

SEQ ID NO: 1348 - RNA, 20 nt, synthetic construct
  misc_feature 1..20: note = HBV-targeting guide sequence portion
  source 1..20: mol_type = other RNA
atccacactccaaaagacac

SEQ ID NO: 1349 - RNA, 20 nt, synthetic construct
  misc_feature 1..20: note = HBV-targeting guide sequence portion
  source 1..20: mol_type = other RNA
atccagaacatctagttaat

SEQ ID NO: 1350 - RNA, 20 nt, synthetic construct
  misc_feature 1..20: note = HBV-targeting guide sequence portion
  source 1..20: mol_type = other RNA
atccagattgggacttcaat

SEQ ID NO: 1351 - RNA, 20 nt, synthetic construct
  misc_feature 1..20: note = HBV-targeting guide sequence portion
  source 1..20: mol_type = other RNA
atccagcgataaccaggaca

SEQ ID NO: 1352 - RNA, 20 nt, synthetic construct
  misc_feature 1..20: note = HBV-targeting guide sequence portion
  source 1..20: mol_type = other RNA
atccagttggcagcacagcc

SEQ ID NO: 1353 - RNA, 20 nt, synthetic construct
  misc_feature 1..20: note = HBV-targeting guide sequence portion
  source 1..20: mol_type = other RNA
atccatactgcggaactcct

SEQ ID NO: 1354 - RNA, 20 nt, synthetic construct
  misc_feature 1..20: note = HBV-targeting guide sequence portion
  source 1..20: mol_type = other RNA
atccatataactgaaagcca

SEQ ID NO: 1355 - RNA, 20 nt, synthetic construct
  misc_feature 1..20: note = HBV-targeting guide sequence portion
  source 1..20: mol_type = other RNA
atcccaacaaggatccctgg

SEQ ID NO: 1356 - RNA, 20 nt, synthetic construct
  misc_feature 1..20: note = HBV-targeting guide sequence portion
  source 1..20: mol_type = other RNA
atcccagaggattgctggtg

SEQ ID NO: 1357 - RNA, 20 nt, synthetic construct
  misc_feature 1..20: note = HBV-targeting guide sequence portion
  source 1..20: mol_type = other RNA
atcccagagtgagaggcctg

SEQ ID NO: 1358 - RNA, 20 nt, synthetic construct
  misc_feature 1..20: note = HBV-targeting guide sequence portion
  source 1..20: mol_type = other RNA
atcccatcatcctgggcttt

SEQ ID NO: 1359 - RNA, 20 nt, synthetic construct
  misc_feature 1..20: note = HBV-targeting guide sequence portion
  source 1..20: mol_type = other RNA
atccccaacaatcaatgaca

SEQ ID NO: 1360 - RNA, 20 nt, synthetic construct
  misc_feature 1..20: note = HBV-targeting guide sequence portion
  source 1..20: mol_type = other RNA
atccccgagattgagatctt

SEQ ID NO: 1361 - RNA, 20 nt, synthetic construct
  misc_feature 1..20: note = HBV-targeting guide sequence portion
  source 1..20: mol_type = other RNA
atcccgatacagagctgcgg

SEQ ID NO: 1362 - RNA, 20 nt, synthetic construct
  misc_feature 1..20: note = HBV-targeting guide sequence portion
  source 1..20: mol_type = other RNA
atcccgcggacgacccatct

SEQ ID NO: 1363 - RNA, 20 nt, synthetic construct
  misc_feature 1..20: note = HBV-targeting guide sequence portion
  source 1..20: mol_type = other RNA
atccctcctgttgctgtaca

SEQ ID NO: 1364 - RNA, 20 nt, synthetic construct
  misc_feature 1..20: note = HBV-targeting guide sequence portion
  source 1..20: mol_type = other RNA
atccctggccagacgccaac

SEQ ID NO: 1365 - RNA, 20 nt, synthetic construct
  misc_feature 1..20: note = HBV-targeting guide sequence portion
  source 1..20: mol_type = other RNA
atcccttggactcataaggt

SEQ ID NO: 1366 - RNA, 20 nt, synthetic construct
  misc_feature 1..20: note = HBV-targeting guide sequence portion
  source 1..20: mol_type = other RNA
atccgaaggttttgtacagc

SEQ ID NO: 1367 - RNA, 20 nt, synthetic construct
  misc_feature 1..20: note = HBV-targeting guide sequence portion
  source 1..20: mol_type = other RNA
atccgcctcctgcctctacc

SEQ ID NO: 1368 - RNA, 20 nt, synthetic construct
  misc_feature 1..20: note = HBV-targeting guide sequence portion
  source 1..20: mol_type = other RNA
atcctaaattcaccaaatac

SEQ ID NO: 1369 - RNA, 20 nt, synthetic construct
  misc_feature 1..20: note = HBV-targeting guide sequence portion
  source 1..20: mol_type = other RNA
atcctatcaacacttccgga

SEQ ID NO: 1370 - RNA, 20 nt, synthetic construct
  misc_feature 1..20: note = HBV-targeting guide sequence portion
  source 1..20: mol_type = other RNA
atcctcacaataccgcagag

SEQ ID NO: 1371 - RNA, 20 nt, synthetic construct
  misc_feature 1..20: note = HBV-targeting guide sequence portion
  source 1..20: mol_type = other RNA
atcctcgagaagattgacga

SEQ ID NO: 1372 - RNA, 20 nt, synthetic construct
  misc_feature 1..20: note = HBV-targeting guide sequence portion
  source 1..20: mol_type = other RNA
atcctctgggattctttccc

SEQ ID NO: 1373 - RNA, 20 nt, synthetic construct
  misc_feature 1..20: note = HBV-targeting guide sequence portion
  source 1..20: mol_type = other RNA
atcctgatgtgatgttctcc

SEQ ID NO: 1374 - RNA, 20 nt, synthetic construct
  misc_feature 1..20: note = HBV-targeting guide sequence portion
  source 1..20: mol_type = other RNA
atcctgcgcgggacgtcctt

SEQ ID NO: 1375 - RNA, 20 nt, synthetic construct
  misc_feature 1..20: note = HBV-targeting guide sequence portion
  source 1..20: mol_type = other RNA
atcctgctgctatgcctcat

SEQ ID NO: 1376 - RNA, 20 nt, synthetic construct
  misc_feature 1..20: note = HBV-targeting guide sequence portion
  source 1..20: mol_type = other RNA
atcctgctttaatgcccttg

SEQ ID NO: 1377 - RNA, 20 nt, synthetic construct
  misc_feature 1..20: note = HBV-targeting guide sequence portion
  source 1..20: mol_type = other RNA
atcctggaattagaggacag

SEQ ID NO: 1378 - RNA, 20 nt, synthetic construct
  misc_feature 1..20: note = HBV-targeting guide sequence portion
  source 1..20: mol_type = other RNA
atcctgggctttcggaaaat

SEQ ID NO: 1379 - RNA, 20 nt, synthetic construct
  misc_feature 1..20: note = HBV-targeting guide sequence portion
  source 1..20: mol_type = other RNA
atccttgttgggattgaagt

SEQ ID NO: 1380 - RNA, 20 nt, synthetic construct
  misc_feature 1..20: note = HBV-targeting guide sequence portion
  source 1..20: mol_type = other RNA
atcgccagtcaggacggcag

SEQ ID NO: 1381 - RNA, 20 nt, synthetic construct
  misc_feature 1..20: note = HBV-targeting guide sequence portion
  source 1..20: mol_type = other RNA
atcgccgcgtcgcagaagat

SEQ ID NO: 1382 - RNA, 20 nt, synthetic construct
  misc_feature 1..20: note = HBV-targeting guide sequence portion
  source 1..20: mol_type = other RNA
atcgctggatgtgtctgcgg

SEQ ID NO: 1383 - RNA, 20 nt, synthetic construct
  misc_feature 1..20: note = HBV-targeting guide sequence portion
  source 1..20: mol_type = other RNA
atcggcagaggagccggaaa

SEQ ID NO: 1384 - RNA, 20 nt, synthetic construct
  misc_feature 1..20: note = HBV-targeting guide sequence portion
  source 1..20: mol_type = other RNA
atcgggatgccttggagtct

SEQ ID NO: 1385 - RNA, 20 nt, synthetic construct
  misc_feature 1..20: note = HBV-targeting guide sequence portion
  source 1..20: mol_type = other RNA
atcgtcaatcttctcgagga

SEQ ID NO: 1386 - RNA, 20 nt, synthetic construct
  misc_feature 1..20: note = HBV-targeting guide sequence portion
  source 1..20: mol_type = other RNA
atcgttcccatggctgctag

SEQ ID NO: 1387 - RNA, 20 nt, synthetic construct
  misc_feature 1..20: note = HBV-targeting guide sequence portion
  source 1..20: mol_type = other RNA
atctaagcaggctttcactt

SEQ ID NO: 1388 - RNA, 20 nt, synthetic construct
  misc_feature 1..20: note = HBV-targeting guide sequence portion
  source 1..20: mol_type = other RNA
atctaatctcctcccccaac

SEQ ID NO: 1389 - RNA, 20 nt, synthetic construct
  misc_feature 1..20: note = HBV-targeting guide sequence portion
  source 1..20: mol_type = other RNA
atctacaccaagatattatc

SEQ ID NO: 1390 - RNA, 20 nt, synthetic construct
  misc_feature 1..20: note = HBV-targeting guide sequence portion
  source 1..20: mol_type = other RNA
atctagaagatctcgtacgg

SEQ ID NO: 1391 - RNA, 20 nt, synthetic construct
  misc_feature 1..20: note = HBV-targeting guide sequence portion
  source 1..20: mol_type = other RNA
atctagggacctagtagtca

SEQ ID NO: 1392 - RNA, 20 nt, synthetic construct
  misc_feature 1..20: note = HBV-targeting guide sequence portion
  source 1..20: mol_type = other RNA
atctagttaatcattacttc

SEQ ID NO: 1393 - RNA, 20 nt, synthetic construct
  misc_feature 1..20: note = HBV-targeting guide sequence portion
  source 1..20: mol_type = other RNA
atctcaatcgccgcgtcgca

SEQ ID NO: 1394 - RNA, 20 nt, synthetic construct
  misc_feature 1..20: note = HBV-targeting guide sequence portion
  source 1..20: mol_type = other RNA
atctcaatctcggggatctc

SEQ ID NO: 1395 - RNA, 20 nt, synthetic construct
  misc_feature 1..20: note = HBV-targeting guide sequence portion
  source 1..20: mol_type = other RNA
atctcaatgttagtatccct

SEQ ID NO: 1396 - RNA, 20 nt, synthetic construct
  misc_feature 1..20: note = HBV-targeting guide sequence portion
  source 1..20: mol_type = other RNA
atctccctgctggtggctcc

SEQ ID NO: 1397 - RNA, 20 nt, synthetic construct
  misc_feature 1..20: note = HBV-targeting guide sequence portion
  source 1..20: mol_type = other RNA
atctcctcccccaactcctc

SEQ ID NO: 1398 - RNA, 20 nt, synthetic construct
  misc_feature 1..20: note = HBV-targeting guide sequence portion
  source 1..20: mol_type = other RNA
atctcgaggccgcttggggc

SEQ ID NO: 1399 - RNA, 20 nt, synthetic construct
  misc_feature 1..20: note = HBV-targeting guide sequence portion
  source 1..20: mol_type = other RNA
atctcggggatctcaatgtt

SEQ ID NO: 1400 - RNA, 20 nt, synthetic construct
  misc_feature 1..20: note = HBV-targeting guide sequence portion
  source 1..20: mol_type = other RNA
atctcgtacggaaggaaaga

SEQ ID NO: 1401 - RNA, 20 nt, synthetic construct
  misc_feature 1..20: note = HBV-targeting guide sequence portion
  source 1..20: mol_type = other RNA
atctcttgttcatgtcctac

SEQ ID NO: 1402 - RNA, 20 nt, synthetic construct
  misc_feature 1..20: note = HBV-targeting guide sequence portion
  source 1..20: mol_type = other RNA
atctctttgttttgttaggg

SEQ ID NO: 1403 - RNA, 20 nt, synthetic construct
  misc_feature 1..20: note = HBV-targeting guide sequence portion
  source 1..20: mol_type = other RNA
atctgccggaccgtgtgcac

SEQ ID NO: 1404 - RNA, 20 nt, synthetic construct
  misc_feature 1..20: note = HBV-targeting guide sequence portion
  source 1..20: mol_type = other RNA
atctggattgttggagtttg

SEQ ID NO: 1405 - RNA, 20 nt, synthetic construct
  misc_feature 1..20: note = HBV-targeting guide sequence portion
  source 1..20: mol_type = other RNA
atcttcctcttcatcctgct

SEQ ID NO: 1406 - RNA, 20 nt, synthetic construct
  misc_feature 1..20: note = HBV-targeting guide sequence portion
  source 1..20: mol_type = other RNA
atcttcgtctgcgaggcgag

SEQ ID NO: 1407 - RNA, 20 nt, synthetic construct
  misc_feature 1..20: note = HBV-targeting guide sequence portion
  source 1..20: mol_type = other RNA
atcttctaaattagtaccca

SEQ ID NO: 1408 - RNA, 20 nt, synthetic construct
  misc_feature 1..20: note = HBV-targeting guide sequence portion
  source 1..20: mol_type = other RNA
atcttctagataccgccgca

SEQ ID NO: 1409 - RNA, 20 nt, synthetic construct
  misc_feature 1..20: note = HBV-targeting guide sequence portion
  source 1..20: mol_type = other RNA
atcttctcgaggattgggga

SEQ ID NO: 1410 - RNA, 20 nt, synthetic construct
  misc_feature 1..20: note = HBV-targeting guide sequence portion
  source 1..20: mol_type = other RNA
atcttctgcgacgcggcgat

SEQ ID NO: 1411 - RNA, 20 nt, synthetic construct
  misc_feature 1..20: note = HBV-targeting guide sequence portion
  source 1..20: mol_type = other RNA
atcttcttgttggttcttct

SEQ ID NO: 1412 - RNA, 20 nt, synthetic construct
  misc_feature 1..20: note = HBV-targeting guide sequence portion
  source 1..20: mol_type = other RNA
atcttgagtccctttatacc

SEQ ID NO: 1413 - RNA, 20 nt, synthetic construct
  misc_feature 1..20: note = HBV-targeting guide sequence portion
  source 1..20: mol_type = other RNA
atcttgcagagtttggtgga

SEQ ID NO: 1414 - RNA, 20 nt, synthetic construct
  misc_feature 1..20: note = HBV-targeting guide sequence portion
  source 1..20: mol_type = other RNA
atcttggtgtagatgtatat

SEQ ID NO: 1415 - RNA, 20 nt, synthetic construct
  misc_feature 1..20: note = HBV-targeting guide sequence portion
  source 1..20: mol_type = other RNA
atctttccaccagcaatcct

SEQ ID NO: 1416 - RNA, 20 nt, synthetic construct
  misc_feature 1..20: note = HBV-targeting guide sequence portion
  source 1..20: mol_type = other RNA
atctttgtactaggaggctg

SEQ ID NO: 1417 - RNA, 20 nt, synthetic construct
  misc_feature 1..20: note = HBV-targeting guide sequence portion
  source 1..20: mol_type = other RNA
atgaaattaagagaataacc

SEQ ID NO: 1418 - RNA, 20 nt, synthetic construct
  misc_feature 1..20: note = HBV-targeting guide sequence portion
  source 1..20: mol_type = other RNA
atgaacaagagatgattagg

SEQ ID NO: 1419 - RNA, 20 nt, synthetic construct
  misc_feature 1..20: note = HBV-targeting guide sequence portion
  source 1..20: mol_type = other RNA
atgaagaggaagatgataaa

SEQ ID NO: 1420 - RNA, 20 nt, synthetic construct
  misc_feature 1..20: note = HBV-targeting guide sequence portion
  source 1..20: mol_type = other RNA
atgacatagcccatgaaatt

SEQ ID NO: 1421 - RNA, 20 nt, synthetic construct
  misc_feature 1..20: note = HBV-targeting guide sequence portion
  source 1..20: mol_type = other RNA
atgaccaagccccaaccagt

SEQ ID NO: 1422 - RNA, 20 nt, synthetic construct
  misc_feature 1..20: note = HBV-targeting guide sequence portion
  source 1..20: mol_type = other RNA
atgactctagctacctgggt

SEQ ID NO: 1423 - RNA, 20 nt, synthetic construct
  misc_feature 1..20: note = HBV-targeting guide sequence portion
  source 1..20: mol_type = other RNA
atgagaaaagacggttgaaa

SEQ ID NO: 1424 - RNA, 20 nt, synthetic construct
  misc_feature 1..20: note = HBV-targeting guide sequence portion
  source 1..20: mol_type = other RNA
atgagaaggcacagacgggg

SEQ ID NO: 1425 - RNA, 20 nt, synthetic construct
  misc_feature 1..20: note = HBV-targeting guide sequence portion
  source 1..20: mol_type = other RNA
atgaggcatagcagcaggat

SEQ ID NO: 1426 - RNA, 20 nt, synthetic construct
  misc_feature 1..20: note = HBV-targeting guide sequence portion
  source 1..20: mol_type = other RNA
atgaggcgctatgtgttgac

SEQ ID NO: 1427 - RNA, 20 nt, synthetic construct
  misc_feature 1..20: note = HBV-targeting guide sequence portion
  source 1..20: mol_type = other RNA
atgagggttaaagacaggta

SEQ ID NO: 1428 - RNA, 20 nt, synthetic construct
  misc_feature 1..20: note = HBV-targeting guide sequence portion
  source 1..20: mol_type = other RNA
atgagtccaagggatactaa

SEQ ID NO: 1429 - RNA, 20 nt, synthetic construct
  misc_feature 1..20: note = HBV-targeting guide sequence portion
  source 1..20: mol_type = other RNA
atgagtgttgacataactga

SEQ ID NO: 1430 - RNA, 20 nt, synthetic construct
  misc_feature 1..20: note = HBV-targeting guide sequence portion
  source 1..20: mol_type = other RNA
atgagtgtttctcagaggtg

SEQ ID NO: 1431 - RNA, 20 nt, synthetic construct
  misc_feature 1..20: note = HBV-targeting guide sequence portion
  source 1..20: mol_type = other RNA
atgataaaacgccgcagaca

SEQ ID NO: 1432 - RNA, 20 nt, synthetic construct
  misc_feature 1..20: note = HBV-targeting guide sequence portion
  source 1..20: mol_type = other RNA
atgatccccaacaatcaatg

SEQ ID NO: 1433 - RNA, 20 nt, synthetic construct
  misc_feature 1..20: note = HBV-targeting guide sequence portion
  source 1..20: mol_type = other RNA
atgatcctggaattagagga

SEQ ID NO: 1434 - RNA, 20 nt, synthetic construct
  misc_feature 1..20: note = HBV-targeting guide sequence portion
  source 1..20: mol_type = other RNA
atgatctttgtactaggagg

SEQ ID NO: 1435 - RNA, 20 nt, synthetic construct
  misc_feature 1..20: note = HBV-targeting guide sequence portion
  source 1..20: mol_type = other RNA
atgatgggatgggaatacag

SEQ ID NO: 1436 - RNA, 20 nt, synthetic construct
  misc_feature 1..20: note = HBV-targeting guide sequence portion
  source 1..20: mol_type = other RNA
atgatgtgattttgtggcaa

SEQ ID NO: 1437 - RNA, 20 nt, synthetic construct
  misc_feature 1..20: note = HBV-targeting guide sequence portion
  source 1..20: mol_type = other RNA
atgatgtggtattgggggcc

SEQ ID NO: 1438 - RNA, 20 nt, synthetic construct
  misc_feature 1..20: note = HBV-targeting guide sequence portion
  source 1..20: mol_type = other RNA
atgattaactagatgttctg

SEQ ID NO: 1439 - RNA, 20 nt, synthetic construct
  misc_feature 1..20: note = HBV-targeting guide sequence portion
  source 1..20: mol_type = other RNA
atgattaggcagaggtgaaa

SEQ ID NO: 1440 - RNA, 20 nt, synthetic construct
  misc_feature 1..20: note = HBV-targeting guide sequence portion
  source 1..20: mol_type = other RNA
atgcaaaccttgccagcaaa

SEQ ID NO: 1441 - RNA, 20 nt, synthetic construct
  misc_feature 1..20: note = HBV-targeting guide sequence portion
  source 1..20: mol_type = other RNA
atgcaacccccactggttgg

SEQ ID NO: 1442 - RNA, 20 nt, synthetic construct
  misc_feature 1..20: note = HBV-targeting guide sequence portion
  source 1..20: mol_type = other RNA
atgcaactttttcacctctg

SEQ ID NO: 1443 - RNA, 20 nt, synthetic construct
  misc_feature 1..20: note = HBV-targeting guide sequence portion
  source 1..20: mol_type = other RNA
atgcatacaagggcattaaa

SEQ ID NO: 1444 - RNA, 20 nt, synthetic construct
  misc_feature 1..20: note = HBV-targeting guide sequence portion
  source 1..20: mol_type = other RNA
atgcatgtattcaatctaag

SEQ ID NO: 1445 - RNA, 20 nt, synthetic construct
  misc_feature 1..20: note = HBV-targeting guide sequence portion
  source 1..20: mol_type = other RNA
atgcccctatcctatcaaca

SEQ ID NO: 1446 - RNA, 20 nt, synthetic construct
  misc_feature 1..20: note = HBV-targeting guide sequence portion
  source 1..20: mol_type = other RNA
atgccctaaagccacccaag

SEQ ID NO: 1447 - RNA, 20 nt, synthetic construct
  misc_feature 1..20: note = HBV-targeting guide sequence portion
  source 1..20: mol_type = other RNA
atgccctgagcctgagggct

SEQ ID NO: 1448 - RNA, 20 nt, synthetic construct
  misc_feature 1..20: note = HBV-targeting guide sequence portion
  source 1..20: mol_type = other RNA
atgcccttgtatgcatgtat

SEQ ID NO: 1449 - RNA, 20 nt, synthetic construct
  misc_feature 1..20: note = HBV-targeting guide sequence portion
  source 1..20: mol_type = other RNA
atgcctacagcctcctagta

SEQ ID NO: 1450 - RNA, 20 nt, synthetic construct
  misc_feature 1..20: note = HBV-targeting guide sequence portion
  source 1..20: mol_type = other RNA
atgcctcaaggtcggtcgtt

SEQ ID NO: 1451 - RNA, 20 nt, synthetic construct
  misc_feature 1..20: note = HBV-targeting guide sequence portion
  source 1..20: mol_type = other RNA
atgcctcatcttcttgttgg

SEQ ID NO: 1452 - RNA, 20 nt, synthetic construct
  misc_feature 1..20: note = HBV-targeting guide sequence portion
  source 1..20: mol_type = other RNA
atgcctgctaggttttatcc

SEQ ID NO: 1453 - RNA, 20 nt, synthetic construct
  misc_feature 1..20: note = HBV-targeting guide sequence portion
  source 1..20: mol_type = other RNA
atgccttggagtctcctgag

SEQ ID NO: 1454 - RNA, 20 nt, synthetic construct
  misc_feature 1..20: note = HBV-targeting guide sequence portion
  source 1..20: mol_type = other RNA
atgcgacgtgcagaggtgaa

SEQ ID NO: 1455 - RNA, 20 nt, synthetic construct
  misc_feature 1..20: note = HBV-targeting guide sequence portion
  source 1..20: mol_type = other RNA
atgcgctgatggcctatgac

SEQ ID NO: 1456 - RNA, 20 nt, synthetic construct
  misc_feature 1..20: note = HBV-targeting guide sequence portion
  source 1..20: mol_type = other RNA
atgcgtggaacctttccggc

SEQ ID NO: 1457 - RNA, 20 nt, synthetic construct
  misc_feature 1..20: note = HBV-targeting guide sequence portion
  source 1..20: mol_type = other RNA
atgctcaggagactccaagg

SEQ ID NO: 1458 - RNA, 20 nt, synthetic construct
  misc_feature 1..20: note = HBV-targeting guide sequence portion
  source 1..20: mol_type = other RNA
atgctccagctcctaccttg

SEQ ID NO: 1459 - RNA, 20 nt, synthetic construct
  misc_feature 1..20: note = HBV-targeting guide sequence portion
  source 1..20: mol_type = other RNA
atgctgtacagacttggccc

SEQ ID NO: 1460 - RNA, 20 nt, synthetic construct
  misc_feature 1..20: note = HBV-targeting guide sequence portion
  source 1..20: mol_type = other RNA
atgctgtagctcttgttccc

SEQ ID NO: 1461 - RNA, 20 nt, synthetic construct
  misc_feature 1..20: note = HBV-targeting guide sequence portion
  source 1..20: mol_type = other RNA
atgcttgatcttctaaatta

SEQ ID NO: 1462 - RNA, 20 nt, synthetic construct
  misc_feature 1..20: note = HBV-targeting guide sequence portion
  source 1..20: mol_type = other RNA
atggaaactgcacctgtatt

SEQ ID NO: 1463 - RNA, 20 nt, synthetic construct
  misc_feature 1..20: note = HBV-targeting guide sequence portion
  source 1..20: mol_type = other RNA
atggaaggcgggtgttttat

SEQ ID NO: 1464 - RNA, 20 nt, synthetic construct
  misc_feature 1..20: note = HBV-targeting guide sequence portion
  source 1..20: mol_type = other RNA
atggacattgacccatataa

SEQ ID NO: 1465 - RNA, 20 nt, synthetic construct
  misc_feature 1..20: note = HBV-targeting guide sequence portion
  source 1..20: mol_type = other RNA
atggagaacatcacatcagg

SEQ ID NO: 1466 - RNA, 20 nt, synthetic construct
  misc_feature 1..20: note = HBV-targeting guide sequence portion
  source 1..20: mol_type = other RNA
atggagaccaccgtgaacgc

SEQ ID NO: 1467 - RNA, 20 nt, synthetic construct
  misc_feature 1..20: note = HBV-targeting guide sequence portion
  source 1..20: mol_type = other RNA
atggatcggcagaggagccg

SEQ ID NO: 1468 - RNA, 20 nt, synthetic construct
  misc_feature 1..20: note = HBV-targeting guide sequence portion
  source 1..20: mol_type = other RNA
atggatgatgtggtattggg

SEQ ID NO: 1469 - RNA, 20 nt, synthetic construct
  misc_feature 1..20: note = HBV-targeting guide sequence portion
  source 1..20: mol_type = other RNA
atggcactagtaaactgagc

SEQ ID NO: 1470 - RNA, 20 nt, synthetic construct
  misc_feature 1..20: note = HBV-targeting guide sequence portion
  source 1..20: mol_type = other RNA
atggcctatgaccaagcccc

SEQ ID NO: 1471 - RNA, 20 nt, synthetic construct
  misc_feature 1..20: note = HBV-targeting guide sequence portion
  source 1..20: mol_type = other RNA
atggcctgaggatgagtgtt

SEQ ID NO: 1472 - RNA, 20 nt, synthetic construct
  misc_feature 1..20: note = HBV-targeting guide sequence portion
  source 1..20: mol_type = other RNA
atggctgctaggctgtgctg

SEQ ID NO: 1473 - RNA, 20 nt, synthetic construct
  misc_feature 1..20: note = HBV-targeting guide sequence portion
  source 1..20: mol_type = other RNA
atgggaacgatgtatatttg

SEQ ID NO: 1474 - RNA, 20 nt, synthetic construct
  misc_feature 1..20: note = HBV-targeting guide sequence portion
  source 1..20: mol_type = other RNA
atgggaatacaggtgcagtt

SEQ ID NO: 1475 - RNA, 20 nt, synthetic construct
  misc_feature 1..20: note = HBV-targeting guide sequence portion
  source 1..20: mol_type = other RNA
atgggagtgggcctcagccc

SEQ ID NO: 1476 - RNA, 20 nt, synthetic construct
  misc_feature 1..20: note = HBV-targeting guide sequence portion
  source 1..20: mol_type = other RNA
atgggatgggaatacaggtg

SEQ ID NO: 1477 - RNA, 20 nt, synthetic construct
  misc_feature 1..20: note = HBV-targeting guide sequence portion
  source 1..20: mol_type = other RNA
atgggcctaaagttcagaca

SEQ ID NO: 1478 - RNA, 20 nt, synthetic construct
  misc_feature 1..20: note = HBV-targeting guide sequence portion
  source 1..20: mol_type = other RNA
atgggctatgtcattgattg

SEQ ID NO: 1479 - RNA, 20 nt, synthetic construct
  misc_feature 1..20: note = HBV-targeting guide sequence portion
  source 1..20: mol_type = other RNA
atggggcagaatctttccac

SEQ ID NO: 1480 - RNA, 20 nt, synthetic construct
  misc_feature 1..20: note = HBV-targeting guide sequence portion
  source 1..20: mol_type = other RNA
atggggttattctcttaatt

SEQ ID NO: 1481 - RNA, 20 nt, synthetic construct
  misc_feature 1..20: note = HBV-targeting guide sequence portion
  source 1..20: mol_type = other RNA
atgggtcaatgtccatgccc

SEQ ID NO: 1482 - RNA, 20 nt, synthetic construct
  misc_feature 1..20: note = HBV-targeting guide sequence portion
  source 1..20: mol_type = other RNA
atgggtcgtccgcgggattc

SEQ ID NO: 1483 - RNA, 20 nt, synthetic construct
  misc_feature 1..20: note = HBV-targeting guide sequence portion
  source 1..20: mol_type = other RNA
atggtgacccacagaatgag

SEQ ID NO: 1484 - RNA, 20 nt, synthetic construct
  misc_feature 1..20: note = HBV-targeting guide sequence portion
  source 1..20: mol_type = other RNA
atggtgaggtgaacaatgct

SEQ ID NO: 1485 - RNA, 20 nt, synthetic construct
  misc_feature 1..20: note = HBV-targeting guide sequence portion
  source 1..20: mol_type = other RNA
atggtgctggtgcgcagacc

SEQ ID NO: 1486 - RNA, 20 nt, synthetic construct
  misc_feature 1..20: note = HBV-targeting guide sequence portion
  source 1..20: mol_type = other RNA
atgtaagaccttgggcaaga

SEQ ID NO: 1487 - RNA, 20 nt, synthetic construct
  misc_feature 1..20: note = HBV-targeting guide sequence portion
  source 1..20: mol_type = other RNA
atgtacacccaaagacaaaa

SEQ ID NO: 1488 - RNA, 20 nt, synthetic construct
  misc_feature 1..20: note = HBV-targeting guide sequence portion
  source 1..20: mol_type = other RNA
atgtatattaggaaaagagg

SEQ ID NO: 1489 - RNA, 20 nt, synthetic construct
  misc_feature 1..20: note = HBV-targeting guide sequence portion
  source 1..20: mol_type = other RNA
atgtatatttgcgggagagg

SEQ ID NO: 1490 - RNA, 20 nt, synthetic construct
  misc_feature 1..20: note = HBV-targeting guide sequence portion
  source 1..20: mol_type = other RNA
atgtatccctcctgttgctg

SEQ ID NO: 1491 - RNA, 20 nt, synthetic construct
  misc_feature 1..20: note = HBV-targeting guide sequence portion
  source 1..20: mol_type = other RNA
atgtattcaatctaagcagg

SEQ ID NO: 1492 - RNA, 20 nt, synthetic construct
  misc_feature 1..20: note = HBV-targeting guide sequence portion
  source 1..20: mol_type = other RNA
atgtcaacactcatatgggc

SEQ ID NO: 1493 - RNA, 20 nt, synthetic construct
  misc_feature 1..20: note = HBV-targeting guide sequence portion
  source 1..20: mol_type = other RNA
atgtcaacgaccgaccttga

SEQ ID NO: 1494 - RNA, 20 nt, synthetic construct
  misc_feature 1..20: note = HBV-targeting guide sequence portion
  source 1..20: mol_type = other RNA
atgtcattgattgttgggga

SEQ ID NO: 1495 - RNA, 20 nt, synthetic construct
  misc_feature 1..20: note = HBV-targeting guide sequence portion
  source 1..20: mol_type = other RNA
atgtccatgccctaaagcca

SEQ ID NO: 1496 - RNA, 20 nt, synthetic construct
  misc_feature 1..20: note = HBV-targeting guide sequence portion
  source 1..20: mol_type = other RNA
atgtcctactgttcaagcct

SEQ ID NO: 1497 - RNA, 20 nt, synthetic construct
  misc_feature 1..20: note = HBV-targeting guide sequence portion
  source 1..20: mol_type = other RNA
atgtgaaaccacaatagttg

SEQ ID NO: 1498 - RNA, 20 nt, synthetic construct
  misc_feature 1..20: note = HBV-targeting guide sequence portion
  source 1..20: mol_type = other RNA
atgtgaacagtttgtaggcc

SEQ ID NO: 1499 - RNA, 20 nt, synthetic construct
  misc_feature 1..20: note = HBV-targeting guide sequence portion
  source 1..20: mol_type = other RNA
atgtgagaggcagtagtcgg

SEQ ID NO: 1500 - RNA, 20 nt, synthetic construct
  misc_feature 1..20: note = HBV-targeting guide sequence portion
  source 1..20: mol_type = other RNA
atgtgatgttctccatgttc

SEQ ID NO: 1501 - RNA, 20 nt, synthetic construct
  misc_feature 1..20: note = HBV-targeting guide sequence portion
  source 1..20: mol_type = other RNA
atgtgattttgtggcaatga

SEQ ID NO: 1502 - RNA, 20 nt, synthetic construct
  misc_feature 1..20: note = HBV-targeting guide sequence portion
  source 1..20: mol_type = other RNA
atgtggtattgggggccaag

SEQ ID NO: 1503 - RNA, 20 nt, synthetic construct
  misc_feature 1..20: note = HBV-targeting guide sequence portion
  source 1..20: mol_type = other RNA
atgtggttatcctgctttaa

SEQ ID NO: 1504 - RNA, 20 nt, synthetic construct
  misc_feature 1..20: note = HBV-targeting guide sequence portion
  source 1..20: mol_type = other RNA
atgtgtctgcggcgttttat

SEQ ID NO: 1505 - RNA, 20 nt, synthetic construct
  misc_feature 1..20: note = HBV-targeting guide sequence portion
  source 1..20: mol_type = other RNA
atgtgttgacactctcttat

SEQ ID NO: 1506 - RNA, 20 nt, synthetic construct
  misc_feature 1..20: note = HBV-targeting guide sequence portion
  source 1..20: mol_type = other RNA
atgttagtatcccttggact

SEQ ID NO: 1507 - RNA, 20 nt, synthetic construct
  misc_feature 1..20: note = HBV-targeting guide sequence portion
  source 1..20: mol_type = other RNA
atgttcagcgcagggtcccc

SEQ ID NO: 1508 - RNA, 20 nt, synthetic construct
  misc_feature 1..20: note = HBV-targeting guide sequence portion
  source 1..20: mol_type = other RNA
atgttctccatgttcagcgc

SEQ ID NO: 1509 - RNA, 20 nt, synthetic construct
  misc_feature 1..20: note = HBV-targeting guide sequence portion
  source 1..20: mol_type = other RNA
atgttctggataataaggtt

SEQ ID NO: 1510 - RNA, 20 nt, synthetic construct
  misc_feature 1..20: note = HBV-targeting guide sequence portion
  source 1..20: mol_type = other RNA
atgtttcagaaaactcccgg

SEQ ID NO: 1511 - RNA, 20 nt, synthetic construct
  misc_feature 1..20: note = HBV-targeting guide sequence portion
  source 1..20: mol_type = other RNA
atgtttcccgtctgtcctct

SEQ ID NO: 1512 - RNA, 20 nt, synthetic construct
  misc_feature 1..20: note = HBV-targeting guide sequence portion
  source 1..20: mol_type = other RNA
atgtttgctccagaccggct

SEQ ID NO: 1513 - RNA, 20 nt, synthetic construct
  misc_feature 1..20: note = HBV-targeting guide sequence portion
  source 1..20: mol_type = other RNA
attaaaccttattatccaga

SEQ ID NO: 1514 - RNA, 20 nt, synthetic construct
  misc_feature 1..20: note = HBV-targeting guide sequence portion
  source 1..20: mol_type = other RNA
attaaagcaggataaccaca

SEQ ID NO: 1515 - RNA, 20 nt, synthetic construct
  misc_feature 1..20: note = HBV-targeting guide sequence portion
  source 1..20: mol_type = other RNA
attaactagatgttctggat

SEQ ID NO: 1516 - RNA, 20 nt, synthetic construct
  misc_feature 1..20: note = HBV-targeting guide sequence portion
  source 1..20: mol_type = other RNA
attaactgtaagcgggccta

SEQ ID NO: 1517 - RNA, 20 nt, synthetic construct
  misc_feature 1..20: note = HBV-targeting guide sequence portion
  source 1..20: mol_type = other RNA
attaagagaataaccccatc

SEQ ID NO: 1518 - RNA, 20 nt, synthetic construct
  misc_feature 1..20: note = HBV-targeting guide sequence portion
  source 1..20: mol_type = other RNA
attaatctaatctcctcccc

SEQ ID NO: 1519 - RNA, 20 nt, synthetic construct
  misc_feature 1..20: note = HBV-targeting guide sequence portion
  source 1..20: mol_type = other RNA
attaatgatctttgtactag

SEQ ID NO: 1520 - RNA, 20 nt, synthetic construct
  misc_feature 1..20: note = HBV-targeting guide sequence portion
  source 1..20: mol_type = other RNA
attacttccaaactagacac

SEQ ID NO: 1521 - RNA, 20 nt, synthetic construct
  misc_feature 1..20: note = HBV-targeting guide sequence portion
  source 1..20: mol_type = other RNA
attagaggacagacgggaaa

SEQ ID NO: 1522 - RNA, 20 nt, synthetic construct
  misc_feature 1..20: note = HBV-targeting guide sequence portion
  source 1..20: mol_type = other RNA
attagattaatgatctttgt

SEQ ID NO: 1523 - RNA, 20 nt, synthetic construct
  misc_feature 1..20: note = HBV-targeting guide sequence portion
  source 1..20: mol_type = other RNA
attaggaaaagagggtgttt

SEQ ID NO: 1524 - RNA, 20 nt, synthetic construct
  misc_feature 1..20: note = HBV-targeting guide sequence portion
  source 1..20: mol_type = other RNA
attaggcagaggtgaaaaag

SEQ ID NO: 1525 - RNA, 20 nt, synthetic construct
  misc_feature 1..20: note = HBV-targeting guide sequence portion
  source 1..20: mol_type = other RNA
attagtacccacccaggtag

SEQ ID NO: 1526 - RNA, 20 nt, synthetic construct
  misc_feature 1..20: note = HBV-targeting guide sequence portion
  source 1..20: mol_type = other RNA
attagttctccccagcaaag

SEQ ID NO: 1527 - RNA, 20 nt, synthetic construct
  misc_feature 1..20: note = HBV-targeting guide sequence portion
  source 1..20: mol_type = other RNA
attatcaaaaaatgtgaaca

SEQ ID NO: 1528 - RNA, 20 nt, synthetic construct
  misc_feature 1..20: note = HBV-targeting guide sequence portion
  source 1..20: mol_type = other RNA
attatccagaacatctagtt

SEQ ID NO: 1529 - RNA, 20 nt, synthetic construct
  misc_feature 1..20: note = HBV-targeting guide sequence portion
  source 1..20: mol_type = other RNA
attatgccctgagcctgagg

SEQ ID NO: 1530 - RNA, 20 nt, synthetic construct
  misc_feature 1..20: note = HBV-targeting guide sequence portion
  source 1..20: mol_type = other RNA
attatgcctgctaggtttta

SEQ ID NO: 1531 - RNA, 20 nt, synthetic construct
  misc_feature 1..20: note = HBV-targeting guide sequence portion
  source 1..20: mol_type = other RNA
attcaatctaagcaggcttt

SEQ ID NO: 1532 - RNA, 20 nt, synthetic construct
  misc_feature 1..20: note = HBV-targeting guide sequence portion
  source 1..20: mol_type = other RNA
attcaccaaatacttgccct

SEQ ID NO: 1533 - RNA, 20 nt, synthetic construct
  misc_feature 1..20: note = HBV-targeting guide sequence portion
  source 1..20: mol_type = other RNA
attcagcgccgacgggacgt

SEQ ID NO: 1534 - RNA, 20 nt, synthetic construct
  misc_feature 1..20: note = HBV-targeting guide sequence portion
  source 1..20: mol_type = other RNA
attccaggatcatcaaccac

SEQ ID NO: 1535 - RNA, 20 nt, synthetic construct
  misc_feature 1..20: note = HBV-targeting guide sequence portion
  source 1..20: mol_type = other RNA
attcccatcccatcatcctg

SEQ ID NO: 1536 - RNA, 20 nt, synthetic construct
  misc_feature 1..20: note = HBV-targeting guide sequence portion
  source 1..20: mol_type = other RNA
attcctaggacccctgctcg

SEQ ID NO: 1537 - RNA, 20 nt, synthetic construct
  misc_feature 1..20: note = HBV-targeting guide sequence portion
  source 1..20: mol_type = other RNA
attcctatgggagtgggcct

SEQ ID NO: 1538 - RNA, 20 nt, synthetic construct
  misc_feature 1..20: note = HBV-targeting guide sequence portion
  source 1..20: mol_type = other RNA
attcgcactcctccagctta

SEQ ID NO: 1539 - RNA, 20 nt, synthetic construct
  misc_feature 1..20: note = HBV-targeting guide sequence portion
  source 1..20: mol_type = other RNA
attcgcagtccccaacctcc

SEQ ID NO: 1540 - RNA, 20 nt, synthetic construct
  misc_feature 1..20: note = HBV-targeting guide sequence portion
  source 1..20: mol_type = other RNA
attcgggctagggttcaccc

SEQ ID NO: 1541 - RNA, 20 nt, synthetic construct
  misc_feature 1..20: note = HBV-targeting guide sequence portion
  source 1..20: mol_type = other RNA
attcgttgacacactttcca

SEQ ID NO: 1542 - RNA, 20 nt, synthetic construct
  misc_feature 1..20: note = HBV-targeting guide sequence portion
  source 1..20: mol_type = other RNA
attctcgggactgacaactc

SEQ ID NO: 1543 - RNA, 20 nt, synthetic construct
  misc_feature 1..20: note = HBV-targeting guide sequence portion
  source 1..20: mol_type = other RNA
attctcttaatttcatgggc

SEQ ID NO: 1544 - RNA, 20 nt, synthetic construct
  misc_feature 1..20: note = HBV-targeting guide sequence portion
  source 1..20: mol_type = other RNA
attctgccccatgctgtagc

SEQ ID NO: 1545 - RNA, 20 nt, synthetic construct
  misc_feature 1..20: note = HBV-targeting guide sequence portion
  source 1..20: mol_type = other RNA
attctgtgggtcaccatatt

SEQ ID NO: 1546 - RNA, 20 nt, synthetic construct
  misc_feature 1..20: note = HBV-targeting guide sequence portion
  source 1..20: mol_type = other RNA
attcttctactgtacctgtc

SEQ ID NO: 1547 - RNA, 20 nt, synthetic construct
  misc_feature 1..20: note = HBV-targeting guide sequence portion
  source 1..20: mol_type = other RNA
attcttgcccaaggtcttac

SEQ ID NO: 1548 - RNA, 20 nt, synthetic construct
  misc_feature 1..20: note = HBV-targeting guide sequence portion
  source 1..20: mol_type = other RNA
attcttgggaacaagagcta

SEQ ID NO: 1549 - RNA, 20 nt, synthetic construct
  misc_feature 1..20: note = HBV-targeting guide sequence portion
  source 1..20: mol_type = other RNA
attcttgtcaacaaggaaaa

SEQ ID NO: 1550 - RNA, 20 nt, synthetic construct
  misc_feature 1..20: note = HBV-targeting guide sequence portion
  source 1..20: mol_type = other RNA
attctttatatgggtcaatg

SEQ ID NO: 1551 - RNA, 20 nt, synthetic construct
  misc_feature 1..20: note = HBV-targeting guide sequence portion
  source 1..20: mol_type = other RNA
attctttcccgaccaccagt

SEQ ID NO: 1552 - RNA, 20 nt, synthetic construct
  misc_feature 1..20: note = HBV-targeting guide sequence portion
  source 1..20: mol_type = other RNA
attctttgattttgtgtatg

SEQ ID NO: 1553 - RNA, 20 nt, synthetic construct
  misc_feature 1..20: note = HBV-targeting guide sequence portion
  source 1..20: mol_type = other RNA
attctttgctggggagaact

SEQ ID NO: 1554 - RNA, 20 nt, synthetic construct
  misc_feature 1..20: note = HBV-targeting guide sequence portion
  source 1..20: mol_type = other RNA
attgaagtcccaatctggat

SEQ ID NO: 1555 - RNA, 20 nt, synthetic construct
  misc_feature 1..20: note = HBV-targeting guide sequence portion
  source 1..20: mol_type = other RNA
attgaatacatgcatacaag

SEQ ID NO: 1556 - RNA, 20 nt, synthetic construct
  misc_feature 1..20: note = HBV-targeting guide sequence portion
  source 1..20: mol_type = other RNA
attgacccatataaagaatt

SEQ ID NO: 1557 - RNA, 20 nt, synthetic construct
  misc_feature 1..20: note = HBV-targeting guide sequence portion
  source 1..20: mol_type = other RNA
attgacgatatgtgagaggc

SEQ ID NO: 1558 - RNA, 20 nt, synthetic construct
  misc_feature 1..20: note = HBV-targeting guide sequence portion
  source 1..20: mol_type = other RNA
attgagagaagtccaccacg

SEQ ID NO: 1559 - RNA, 20 nt, synthetic construct
  misc_feature 1..20: note = HBV-targeting guide sequence portion
  source 1..20: mol_type = other RNA
attgagatccccgagattga

SEQ ID NO: 1560 - RNA, 20 nt, synthetic construct
  misc_feature 1..20: note = HBV-targeting guide sequence portion
  source 1..20: mol_type = other RNA
attgagatcttcgtctgcga

SEQ ID NO: 1561 - RNA, 20 nt, synthetic construct
  misc_feature 1..20: note = HBV-targeting guide sequence portion
  source 1..20: mol_type = other RNA
attgagatcttctgcgacgc

SEQ ID NO: 1562 - RNA, 20 nt, synthetic construct
  misc_feature 1..20: note = HBV-targeting guide sequence portion
  source 1..20: mol_type = other RNA
attgattatgcctgctaggt

SEQ ID NO: 1563 - RNA, 20 nt, synthetic construct
  misc_feature 1..20: note = HBV-targeting guide sequence portion
  source 1..20: mol_type = other RNA
attgattggaaagtgtgtca

SEQ ID NO: 1564 - RNA, 20 nt, synthetic construct
  misc_feature 1..20: note = HBV-targeting guide sequence portion
  source 1..20: mol_type = other RNA
attgattgttggggatcatt

SEQ ID NO: 1565 - RNA, 20 nt, synthetic construct
  misc_feature 1..20: note = HBV-targeting guide sequence portion
  source 1..20: mol_type = other RNA
attgcagagagtccaagagt

SEQ ID NO: 1566 - RNA, 20 nt, synthetic construct
  misc_feature 1..20: note = HBV-targeting guide sequence portion
  source 1..20: mol_type = other RNA
attgccacaaaatcacatca

SEQ ID NO: 1567 - RNA, 20 nt, synthetic construct
  misc_feature 1..20: note = HBV-targeting guide sequence portion
  source 1..20: mol_type = other RNA
attgctggtggaaagattct

SEQ ID NO: 1568 - RNA, 20 nt, synthetic construct
  misc_feature 1..20: note = HBV-targeting guide sequence portion
  source 1..20: mol_type = other RNA
attgcttgcctgagtgcagt

SEQ ID NO: 1569 - RNA, 20 nt, synthetic construct
  misc_feature 1..20: note = HBV-targeting guide sequence portion
  source 1..20: mol_type = other RNA
attggaaaacaccctctttt

SEQ ID NO: 1570 - RNA, 20 nt, synthetic construct
  misc_feature 1..20: note = HBV-targeting guide sequence portion
  source 1..20: mol_type = other RNA
attggaaagtgtgtcaacga

SEQ ID NO: 1571 - RNA, 20 nt, synthetic construct
  misc_feature 1..20: note = HBV-targeting guide sequence portion
  source 1..20: mol_type = other RNA
attggaggttggggactgcg

SEQ ID NO: 1572 - RNA, 20 nt, synthetic construct
  misc_feature 1..20: note = HBV-targeting guide sequence portion
  source 1..20: mol_type = other RNA
attgggacttcaatcccaac

SEQ ID NO: 1573 - RNA, 20 nt, synthetic construct
  misc_feature 1..20: note = HBV-targeting guide sequence portion
  source 1..20: mol_type = other RNA
attggggaccctgcgctgaa

SEQ ID NO: 1574 - RNA, 20 nt, synthetic construct
  misc_feature 1..20: note = HBV-targeting guide sequence portion
  source 1..20: mol_type = other RNA
attgggggccaagtctgtac

SEQ ID NO: 1575 - RNA, 20 nt, synthetic construct
  misc_feature 1..20: note = HBV-targeting guide sequence portion
  source 1..20: mol_type = other RNA
attggtaacagcggtataaa

SEQ ID NO: 1576 - RNA, 20 nt, synthetic construct
  misc_feature 1..20: note = HBV-targeting guide sequence portion
  source 1..20: mol_type = other RNA
attggtagaggcaggaggcg

SEQ ID NO: 1577 - RNA, 20 nt, synthetic construct
  misc_feature 1..20: note = HBV-targeting guide sequence portion
  source 1..20: mol_type = other RNA
attggtctgcgcaccagcac

SEQ ID NO: 1578 - RNA, 20 nt, synthetic construct
  misc_feature 1..20: note = HBV-targeting guide sequence portion
  source 1..20: mol_type = other RNA
attggtgggcgttcacggtg

SEQ ID NO: 1579 - RNA, 20 nt, synthetic construct
  misc_feature 1..20: note = HBV-targeting guide sequence portion
  source 1..20: mol_type = other RNA
attgtgaggattcttgtcaa

SEQ ID NO: 1580 - RNA, 20 nt, synthetic construct
  misc_feature 1..20: note = HBV-targeting guide sequence portion
  source 1..20: mol_type = other RNA
attgtgggtcttctgggttt

SEQ ID NO: 1581 - RNA, 20 nt, synthetic construct
  misc_feature 1..20: note = HBV-targeting guide sequence portion
  source 1..20: mol_type = other RNA
attgtggtttcacatttctt

SEQ ID NO: 1582 - RNA, 20 nt, synthetic construct
  misc_feature 1..20: note = HBV-targeting guide sequence portion
  source 1..20: mol_type = other RNA
attgtgtaaaaggggcagca

SEQ ID NO: 1583 - RNA, 20 nt, synthetic construct
  misc_feature 1..20: note = HBV-targeting guide sequence portion
  source 1..20: mol_type = other RNA
attgttcacctcaccatact

SEQ ID NO: 1584 - RNA, 20 nt, synthetic construct
  misc_feature 1..20: note = HBV-targeting guide sequence portion
  source 1..20: mol_type = other RNA
attgttggagtttgctctga

SEQ ID NO: 1585 - RNA, 20 nt, synthetic construct
  misc_feature 1..20: note = HBV-targeting guide sequence portion
  source 1..20: mol_type = other RNA
attgttggggatcattgcca

SEQ ID NO: 1586 - RNA, 20 nt, synthetic construct
  misc_feature 1..20: note = HBV-targeting guide sequence portion
  source 1..20: mol_type = other RNA
attgtttacacagaaaggcc

SEQ ID NO: 1587 - RNA, 20 nt, synthetic construct
  misc_feature 1..20: note = HBV-targeting guide sequence portion
  source 1..20: mol_type = other RNA
atttaaaccctaacaaaaca

SEQ ID NO: 1588 - RNA, 20 nt, synthetic construct
  misc_feature 1..20: note = HBV-targeting guide sequence portion
  source 1..20: mol_type = other RNA
atttacacactctatggaag

SEQ ID NO: 1589 - RNA, 20 nt, synthetic construct
  misc_feature 1..20: note = HBV-targeting guide sequence portion
  source 1..20: mol_type = other RNA
atttagaagatcaagcatct

SEQ ID NO: 1590 - RNA, 20 nt, synthetic construct
  misc_feature 1..20: note = HBV-targeting guide sequence portion
  source 1..20: mol_type = other RNA
atttaggataaaacctagca

SEQ ID NO: 1591 - RNA, 20 nt, synthetic construct
  misc_feature 1..20: note = HBV-targeting guide sequence portion
  source 1..20: mol_type = other RNA
atttatgcctacagcctcct

SEQ ID NO: 1592 - RNA, 20 nt, synthetic construct
  misc_feature 1..20: note = HBV-targeting guide sequence portion
  source 1..20: mol_type = other RNA
atttcaaccgtcttttctca

SEQ ID NO: 1593 - RNA, 20 nt, synthetic construct
  misc_feature 1..20: note = HBV-targeting guide sequence portion
  source 1..20: mol_type = other RNA
atttcatgggctatgtcatt

SEQ ID NO: 1594 - RNA, 20 nt, synthetic construct
  misc_feature 1..20: note = HBV-targeting guide sequence portion
  source 1..20: mol_type = other RNA
atttcccaccttatgagtcc

SEQ ID NO: 1595 - RNA, 20 nt, synthetic construct
  misc_feature 1..20: note = HBV-targeting guide sequence portion
  source 1..20: mol_type = other RNA
atttcttgtcttacttttgg

SEQ ID NO: 1596 - RNA, 20 nt, synthetic construct
  misc_feature 1..20: note = HBV-targeting guide sequence portion
  source 1..20: mol_type = other RNA
atttgcgggagaggacaaca

SEQ ID NO: 1597 - RNA, 20 nt, synthetic construct
  misc_feature 1..20: note = HBV-targeting guide sequence portion
  source 1..20: mol_type = other RNA
atttgctggcaaggtttgca

SEQ ID NO: 1598 - RNA, 20 nt, synthetic construct
  misc_feature 1..20: note = HBV-targeting guide sequence portion
  source 1..20: mol_type = other RNA
atttggagctactgtggagt

SEQ ID NO: 1599 - RNA, 20 nt, synthetic construct
  misc_feature 1..20: note = HBV-targeting guide sequence portion
  source 1..20: mol_type = other RNA
atttggtgaatttaggataa

SEQ ID NO: 1600 - RNA, 20 nt, synthetic construct
  misc_feature 1..20: note = HBV-targeting guide sequence portion
  source 1..20: mol_type = other RNA
atttggtggtctataagctg

SEQ ID NO: 1601 - RNA, 20 nt, synthetic construct
  misc_feature 1..20: note = HBV-targeting guide sequence portion
  source 1..20: mol_type = other RNA
atttggtgtcttttggagtg

SEQ ID NO: 1602 - RNA, 20 nt, synthetic construct
  misc_feature 1..20: note = HBV-targeting guide sequence portion
  source 1..20: mol_type = other RNA
atttgttcagtggttcgtag

SEQ ID NO: 1603 - RNA, 20 nt, synthetic construct
  misc_feature 1..20: note = HBV-targeting guide sequence portion
  source 1..20: mol_type = other RNA
attttacggggctttattct

SEQ ID NO: 1604 - RNA, 20 nt, synthetic construct
  misc_feature 1..20: note = HBV-targeting guide sequence portion
  source 1..20: mol_type = other RNA
attttccgaaagcccaggat

SEQ ID NO: 1605 - RNA, 20 nt, synthetic construct
  misc_feature 1..20: note = HBV-targeting guide sequence portion
  source 1..20: mol_type = other RNA
attttctagggggaactacc

SEQ ID NO: 1606 - RNA, 20 nt, synthetic construct
  misc_feature 1..20: note = HBV-targeting guide sequence portion
  source 1..20: mol_type = other RNA
attttcttttgtctttgggt

SEQ ID NO: 1607 - RNA, 20 nt, synthetic construct
  misc_feature 1..20: note = HBV-targeting guide sequence portion
  source 1..20: mol_type = other RNA
attttggccaagacacacgg

SEQ ID NO: 1608 - RNA, 20 nt, synthetic construct
  misc_feature 1..20: note = HBV-targeting guide sequence portion
  source 1..20: mol_type = other RNA
attttgtggcaatgatcccc

SEQ ID NO: 1609 - RNA, 20 nt, synthetic construct
  misc_feature 1..20: note = HBV-targeting guide sequence portion
  source 1..20: mol_type = other RNA
attttgtgtatgatgtgatt

SEQ ID NO: 1610 - RNA, 20 nt, synthetic construct
  misc_feature 1..20: note = HBV-targeting guide sequence portion
  source 1..20: mol_type = other RNA
attttttgataatatcttgg

SEQ ID NO: 1611 - RNA, 20 nt, synthetic construct
  misc_feature 1..20: note = HBV-targeting guide sequence portion
  source 1..20: mol_type = other RNA
caaaaaatgtgaacagtttg

SEQ ID NO: 1612 - RNA, 20 nt, synthetic construct
  misc_feature 1..20: note = HBV-targeting guide sequence portion
  source 1..20: mol_type = other RNA
caaaaacgagagtaactcca

SEQ ID NO: 1613 - RNA, 20 nt, synthetic construct
  misc_feature 1..20: note = HBV-targeting guide sequence portion
  source 1..20: mol_type = other RNA
caaaacaaagagatggggtt

SEQ ID NO: 1614 - RNA, 20 nt, synthetic construct
  misc_feature 1..20: note = HBV-targeting guide sequence portion
  source 1..20: mol_type = other RNA
caaaacaagcggctaggagt

SEQ ID NO: 1615 - RNA, 20 nt, synthetic construct
  misc_feature 1..20: note = HBV-targeting guide sequence portion
  source 1..20: mol_type = other RNA
caaaacccagaagacccaca

SEQ ID NO: 1616 - RNA, 20 nt, synthetic construct
  misc_feature 1..20: note = HBV-targeting guide sequence portion
  source 1..20: mol_type = other RNA
caaaaccttcggatggaaac

SEQ ID NO: 1617 - RNA, 20 nt, synthetic construct
  misc_feature 1..20: note = HBV-targeting guide sequence portion
  source 1..20: mol_type = other RNA
caaaagaaaattggtaacag

SEQ ID NO: 1618 - RNA, 20 nt, synthetic construct
  misc_feature 1..20: note = HBV-targeting guide sequence portion
  source 1..20: mol_type = other RNA
caaaagacaccaaatactct

SEQ ID NO: 1619 - RNA, 20 nt, synthetic construct
  misc_feature 1..20: note = HBV-targeting guide sequence portion
  source 1..20: mol_type = other RNA
caaaaggcctccgtgcggtg

SEQ ID NO: 1620 - RNA, 20 nt, synthetic construct
  misc_feature 1..20: note = HBV-targeting guide sequence portion
  source 1..20: mol_type = other RNA
caaaagtaagacaagaaatg

SEQ ID NO: 1621 - RNA, 20 nt, synthetic construct
  misc_feature 1..20: note = HBV-targeting guide sequence portion
  source 1..20: mol_type = other RNA
caaaatcaaagaatgtttca

SEQ ID NO: 1622 - RNA, 20 nt, synthetic construct
  misc_feature 1..20: note = HBV-targeting guide sequence portion
  source 1..20: mol_type = other RNA
caaaatcacatcatacacaa

SEQ ID NO: 1623 - RNA, 20 nt, synthetic construct
  misc_feature 1..20: note = HBV-targeting guide sequence portion
  source 1..20: mol_type = other RNA
caaaattcgcagtccccaac

SEQ ID NO: 1624 - RNA, 20 nt, synthetic construct
  misc_feature 1..20: note = HBV-targeting guide sequence portion
  source 1..20: mol_type = other RNA
caaacacttggcacagacct

SEQ ID NO: 1625 - RNA, 20 nt, synthetic construct
  misc_feature 1..20: note = HBV-targeting guide sequence portion
  source 1..20: mol_type = other RNA
caaacagtctttgaagtatg

SEQ ID NO: 1626 - RNA, 20 nt, synthetic construct
  misc_feature 1..20: note = HBV-targeting guide sequence portion
  source 1..20: mol_type = other RNA
caaacagtgggggaaagccc

SEQ ID NO: 1627 - RNA, 20 nt, synthetic construct
  misc_feature 1..20: note = HBV-targeting guide sequence portion
  source 1..20: mol_type = other RNA
caaacattctcgggactgac

SEQ ID NO: 1628 - RNA, 20 nt, synthetic construct
  misc_feature 1..20: note = HBV-targeting guide sequence portion
  source 1..20: mol_type = other RNA
caaaccttgccagcaaatcc

SEQ ID NO: 1629 - RNA, 20 nt, synthetic construct
  misc_feature 1..20: note = HBV-targeting guide sequence portion
  source 1..20: mol_type = other RNA
caaactagacactatttaca

SEQ ID NO: 1630 - RNA, 20 nt, synthetic construct
  misc_feature 1..20: note = HBV-targeting guide sequence portion
  source 1..20: mol_type = other RNA
caaactccaacaatccagat

SEQ ID NO: 1631 - RNA, 20 nt, synthetic construct
  misc_feature 1..20: note = HBV-targeting guide sequence portion
  source 1..20: mol_type = other RNA
caaactctgcaagatcccag

SEQ ID NO: 1632 - RNA, 20 nt, synthetic construct
  misc_feature 1..20: note = HBV-targeting guide sequence portion
  source 1..20: mol_type = other RNA
caaactgttcacattttttg

SEQ ID NO: 1633 - RNA, 20 nt, synthetic construct
  misc_feature 1..20: note = HBV-targeting guide sequence portion
  source 1..20: mol_type = other RNA
caaagaatgtttcagaaaac

SEQ ID NO: 1634 - RNA, 20 nt, synthetic construct
  misc_feature 1..20: note = HBV-targeting guide sequence portion
  source 1..20: mol_type = other RNA
caaagaattgcttgcctgag

SEQ ID NO: 1635 - RNA, 20 nt, synthetic construct
  misc_feature 1..20: note = HBV-targeting guide sequence portion
  source 1..20: mol_type = other RNA
caaagacaaaagaaaattgg

SEQ ID NO: 1636 - RNA, 20 nt, synthetic construct
  misc_feature 1..20: note = HBV-targeting guide sequence portion
  source 1..20: mol_type = other RNA
caaagactgtttgtttaaag

SEQ ID NO: 1637 - RNA, 20 nt, synthetic construct
  misc_feature 1..20: note = HBV-targeting guide sequence portion
  source 1..20: mol_type = other RNA
caaagagatggggttattct

SEQ ID NO: 1638 - RNA, 20 nt, synthetic construct
  misc_feature 1..20: note = HBV-targeting guide sequence portion
  source 1..20: mol_type = other RNA
caaagatcattaatctaatc

SEQ ID NO: 1639 - RNA, 20 nt, synthetic construct
  misc_feature 1..20: note = HBV-targeting guide sequence portion
  source 1..20: mol_type = other RNA
caaaggacgtcccgcgcagg

SEQ ID NO: 1640 - RNA, 20 nt, synthetic construct
  misc_feature 1..20: note = HBV-targeting guide sequence portion
  source 1..20: mol_type = other RNA
caaatactctaggaccgttt

SEQ ID NO: 1641 - RNA, 20 nt, synthetic construct
  misc_feature 1..20: note = HBV-targeting guide sequence portion
  source 1..20: mol_type = other RNA
caaatacttgcccttggata

SEQ ID NO: 1642 - RNA, 20 nt, synthetic construct
  misc_feature 1..20: note = HBV-targeting guide sequence portion
  source 1..20: mol_type = other RNA
caaatatacatcgttcccat

SEQ ID NO: 1643 - RNA, 20 nt, synthetic construct
  misc_feature 1..20: note = HBV-targeting guide sequence portion
  source 1..20: mol_type = other RNA
caaatccgcctcctgcctct

SEQ ID NO: 1644 - RNA, 20 nt, synthetic construct
  misc_feature 1..20: note = HBV-targeting guide sequence portion
  source 1..20: mol_type = other RNA
caaatgcccctatcctatca

SEQ ID NO: 1645 - RNA, 20 nt, synthetic construct
  misc_feature 1..20: note = HBV-targeting guide sequence portion
  source 1..20: mol_type = other RNA
caaatggcactagtaaactg

SEQ ID NO: 1646 - RNA, 20 nt, synthetic construct
  misc_feature 1..20: note = HBV-targeting guide sequence portion
  source 1..20: mol_type = other RNA
caaattctttatatgggtca

SEQ ID NO: 1647 - RNA, 20 nt, synthetic construct
  misc_feature 1..20: note = HBV-targeting guide sequence portion
  source 1..20: mol_type = other RNA
caacaagaagatgaggcata

SEQ ID NO: 1648 - RNA, 20 nt, synthetic construct
  misc_feature 1..20: note = HBV-targeting guide sequence portion
  source 1..20: mol_type = other RNA
caacaaggaaaaccccgcct

SEQ ID NO: 1649 - RNA, 20 nt, synthetic construct
  misc_feature 1..20: note = HBV-targeting guide sequence portion
  source 1..20: mol_type = other RNA
caacaaggatccctggccag

SEQ ID NO: 1650 - RNA, 20 nt, synthetic construct
  misc_feature 1..20: note = HBV-targeting guide sequence portion
  source 1..20: mol_type = other RNA
caacaaggtaggagctggag

SEQ ID NO: 1651 - RNA, 20 nt, synthetic construct
  misc_feature 1..20: note = HBV-targeting guide sequence portion
  source 1..20: mol_type = other RNA
caacaatcaatgacatagcc

SEQ ID NO: 1652 - RNA, 20 nt, synthetic construct
  misc_feature 1..20: note = HBV-targeting guide sequence portion
  source 1..20: mol_type = other RNA
caacaatccagattgggact

SEQ ID NO: 1653 - RNA, 20 nt, synthetic construct
  misc_feature 1..20: note = HBV-targeting guide sequence portion
  source 1..20: mol_type = other RNA
caacacaagtctccggaagt

SEQ ID NO: 1654 - RNA, 20 nt, synthetic construct
  misc_feature 1..20: note = HBV-targeting guide sequence portion
  source 1..20: mol_type = other RNA
caacacatagcgcctcattc

SEQ ID NO: 1655 - RNA, 20 nt, synthetic construct
  misc_feature 1..20: note = HBV-targeting guide sequence portion
  source 1..20: mol_type = other RNA
caacactcatatgggcctaa

SEQ ID NO: 1656 - RNA, 20 nt, synthetic construct
  misc_feature 1..20: note = HBV-targeting guide sequence portion
  source 1..20: mol_type = other RNA
caacacttccggagacttgt

SEQ ID NO: 1657 - RNA, 20 nt, synthetic construct
  misc_feature 1..20: note = HBV-targeting guide sequence portion
  source 1..20: mol_type = other RNA
caacagagttgtcagtcccg

SEQ ID NO: 1658 - RNA, 20 nt, synthetic construct
  misc_feature 1..20: note = HBV-targeting guide sequence portion
  source 1..20: mol_type = other RNA
caacaggagggatacataga

SEQ ID NO: 1659 - RNA, 20 nt, synthetic construct
  misc_feature 1..20: note = HBV-targeting guide sequence portion
  source 1..20: mol_type = other RNA
caaccaccagcacgggaccc

SEQ ID NO: 1660 - RNA, 20 nt, synthetic construct
  misc_feature 1..20: note = HBV-targeting guide sequence portion
  source 1..20: mol_type = other RNA
caaccagtgggggttgcatc

SEQ ID NO: 1661 - RNA, 20 nt, synthetic construct
  misc_feature 1..20: note = HBV-targeting guide sequence portion
  source 1..20: mol_type = other RNA
caacccccactggttggggc

SEQ ID NO: 1662 - RNA, 20 nt, synthetic construct
  misc_feature 1..20: note = HBV-targeting guide sequence portion
  source 1..20: mol_type = other RNA
caaccgtcttttctcattaa

SEQ ID NO: 1663 - RNA, 20 nt, synthetic construct
  misc_feature 1..20: note = HBV-targeting guide sequence portion
  source 1..20: mol_type = other RNA
caacctccaatcactcacca

SEQ ID NO: 1664 - RNA, 20 nt, synthetic construct
  misc_feature 1..20: note = HBV-targeting guide sequence portion
  source 1..20: mol_type = other RNA
caacctcctgtcctccaact

SEQ ID NO: 1665 - RNA, 20 nt, synthetic construct
  misc_feature 1..20: note = HBV-targeting guide sequence portion
  source 1..20: mol_type = other RNA
caaccttccaccaaactctg

SEQ ID NO: 1666 - RNA, 20 nt, synthetic construct
  misc_feature 1..20: note = HBV-targeting guide sequence portion
  source 1..20: mol_type = other RNA
caacgaattgtgggtcttct

SEQ ID NO: 1667 - RNA, 20 nt, synthetic construct
  misc_feature 1..20: note = HBV-targeting guide sequence portion
  source 1..20: mol_type = other RNA
caacgaccgaccttgaggca

SEQ ID NO: 1668 - RNA, 20 nt, synthetic construct
  misc_feature 1..20: note = HBV-targeting guide sequence portion
  source 1..20: mol_type = other RNA
caacggccaggtctgtgcca

SEQ ID NO: 1669 - RNA, 20 nt, synthetic construct
  misc_feature 1..20: note = HBV-targeting guide sequence portion
  source 1..20: mol_type = other RNA
caacggggtaaaggttcagg

SEQ ID NO: 1670 - RNA, 20 nt, synthetic construct
  misc_feature 1..20: note = HBV-targeting guide sequence portion
  source 1..20: mol_type = other RNA
caactattgtggtttcacat

SEQ ID NO: 1671 - RNA, 20 nt, synthetic construct
  misc_feature 1..20: note = HBV-targeting guide sequence portion
  source 1..20: mol_type = other RNA
caactcctcccagtctttaa

SEQ ID NO: 1672 - RNA, 20 nt, synthetic construct
  misc_feature 1..20: note = HBV-targeting guide sequence portion
  source 1..20: mol_type = other RNA
caactctgttgtcctctccc

SEQ ID NO: 1673 - RNA, 20 nt, synthetic construct
  misc_feature 1..20: note = HBV-targeting guide sequence portion
  source 1..20: mol_type = other RNA
caactggatcctgcgcggga

SEQ ID NO: 1674 - RNA, 20 nt, synthetic construct
  misc_feature 1..20: note = HBV-targeting guide sequence portion
  source 1..20: mol_type = other RNA
caactggtggtcgggaaaga

SEQ ID NO: 1675 - RNA, 20 nt, synthetic construct
  misc_feature 1..20: note = HBV-targeting guide sequence portion
  source 1..20: mol_type = other RNA
caacttacaaggcctttctg

SEQ ID NO: 1676 - RNA, 20 nt, synthetic construct
  misc_feature 1..20: note = HBV-targeting guide sequence portion
  source 1..20: mol_type = other RNA
caacttgtcctggttatcgc

SEQ ID NO: 1677 - RNA, 20 nt, synthetic construct
  misc_feature 1..20: note = HBV-targeting guide sequence portion
  source 1..20: mol_type = other RNA
caactttttcacctctgcct

SEQ ID NO: 1678 - RNA, 20 nt, synthetic construct
  misc_feature 1..20: note = HBV-targeting guide sequence portion
  source 1..20: mol_type = other RNA
caagaaatgtgaaaccacaa

SEQ ID NO: 1679 - RNA, 20 nt, synthetic construct
  misc_feature 1..20: note = HBV-targeting guide sequence portion
  source 1..20: mol_type = other RNA
caagaagatgaggcatagca

SEQ ID NO: 1680 - RNA, 20 nt, synthetic construct
  misc_feature 1..20: note = HBV-targeting guide sequence portion
  source 1..20: mol_type = other RNA
caagaatatggtgacccaca

SEQ ID NO: 1681 - RNA, 20 nt, synthetic construct
  misc_feature 1..20: note = HBV-targeting guide sequence portion
  source 1..20: mol_type = other RNA
caagaatcctcacaataccg

SEQ ID NO: 1682 - RNA, 20 nt, synthetic construct
  misc_feature 1..20: note = HBV-targeting guide sequence portion
  source 1..20: mol_type = other RNA
caagaattggtgggcgttca

SEQ ID NO: 1683 - RNA, 20 nt, synthetic construct
  misc_feature 1..20: note = HBV-targeting guide sequence portion
  source 1..20: mol_type = other RNA
caagacacacggtagttccc

SEQ ID NO: 1684 - RNA, 20 nt, synthetic construct
  misc_feature 1..20: note = HBV-targeting guide sequence portion
  source 1..20: mol_type = other RNA
caagagaaacgggctgaggc

SEQ ID NO: 1685 - RNA, 20 nt, synthetic construct
  misc_feature 1..20: note = HBV-targeting guide sequence portion
  source 1..20: mol_type = other RNA
caagagatgattaggcagag

SEQ ID NO: 1686 - RNA, 20 nt, synthetic construct
  misc_feature 1..20: note = HBV-targeting guide sequence portion
  source 1..20: mol_type = other RNA
caagagctacagcatggggc

SEQ ID NO: 1687 - RNA, 20 nt, synthetic construct
  misc_feature 1..20: note = HBV-targeting guide sequence portion
  source 1..20: mol_type = other RNA
caagagtcctcttatgtaag

SEQ ID NO: 1688 - RNA, 20 nt, synthetic construct
  misc_feature 1..20: note = HBV-targeting guide sequence portion
  source 1..20: mol_type = other RNA
caagatattatcaaaaaatg

SEQ ID NO: 1689 - RNA, 20 nt, synthetic construct
  misc_feature 1..20: note = HBV-targeting guide sequence portion
  source 1..20: mol_type = other RNA
caagatcccagagtgagagg

SEQ ID NO: 1690 - RNA, 20 nt, synthetic construct
  misc_feature 1..20: note = HBV-targeting guide sequence portion
  source 1..20: mol_type = other RNA
caagatgctgtacagacttg

SEQ ID NO: 1691 - RNA, 20 nt, synthetic construct
  misc_feature 1..20: note = HBV-targeting guide sequence portion
  source 1..20: mol_type = other RNA
caagcaattctttgctgggg

SEQ ID NO: 1692 - RNA, 20 nt, synthetic construct
  misc_feature 1..20: note = HBV-targeting guide sequence portion
  source 1..20: mol_type = other RNA
caagcatctagggacctagt

SEQ ID NO: 1693 - RNA, 20 nt, synthetic construct
  misc_feature 1..20: note = HBV-targeting guide sequence portion
  source 1..20: mol_type = other RNA
caagccccaaccagtggggg

SEQ ID NO: 1694 - RNA, 20 nt, synthetic construct
  misc_feature 1..20: note = HBV-targeting guide sequence portion
  source 1..20: mol_type = other RNA
caagcctccaagctgtgcct

SEQ ID NO: 1695 - RNA, 20 nt, synthetic construct
  misc_feature 1..20: note = HBV-targeting guide sequence portion
  source 1..20: mol_type = other RNA
caagcggcctcgagatgggt

SEQ ID NO: 1696 - RNA, 20 nt, synthetic construct
  misc_feature 1..20: note = HBV-targeting guide sequence portion
  source 1..20: mol_type = other RNA
caagcggctaggagttccgc

SEQ ID NO: 1697 - RNA, 20 nt, synthetic construct
  misc_feature 1..20: note = HBV-targeting guide sequence portion
  source 1..20: mol_type = other RNA
caagctgtgccttgggtggc

SEQ ID NO: 1698 - RNA, 20 nt, synthetic construct
  misc_feature 1..20: note = HBV-targeting guide sequence portion
  source 1..20: mol_type = other RNA
caaggaaaaccccgcctgta

SEQ ID NO: 1699 - RNA, 20 nt, synthetic construct
  misc_feature 1..20: note = HBV-targeting guide sequence portion
  source 1..20: mol_type = other RNA
caaggaacctctatgtatcc

SEQ ID NO: 1700 - RNA, 20 nt, synthetic construct
  misc_feature 1..20: note = HBV-targeting guide sequence portion
  source 1..20: mol_type = other RNA
caaggatccctggccagacg

SEQ ID NO: 1701 - RNA, 20 nt, synthetic construct
  misc_feature 1..20: note = HBV-targeting guide sequence portion
  source 1..20: mol_type = other RNA
caaggcacagcttggaggct

SEQ ID NO: 1702 - RNA, 20 nt, synthetic construct
  misc_feature 1..20: note = HBV-targeting guide sequence portion
  source 1..20: mol_type = other RNA
caaggcatcccgatacagag

SEQ ID NO: 1703 - RNA, 20 nt, synthetic construct
  misc_feature 1..20: note = HBV-targeting guide sequence portion
  source 1..20: mol_type = other RNA
caaggcctttctgtgtaaac

SEQ ID NO: 1704 - RNA, 20 nt, synthetic construct
  misc_feature 1..20: note = HBV-targeting guide sequence portion
  source 1..20: mol_type = other RNA
caagggatactaacattgag

SEQ ID NO: 1705 - RNA, 20 nt, synthetic construct
  misc_feature 1..20: note = HBV-targeting guide sequence portion
  source 1..20: mol_type = other RNA
caagggcaagtatttggtga

SEQ ID NO: 1706 - RNA, 20 nt, synthetic construct
  misc_feature 1..20: note = HBV-targeting guide sequence portion
  source 1..20: mol_type = other RNA
caagggcattaaagcaggat

SEQ ID NO: 1707 - RNA, 20 nt, synthetic construct
  misc_feature 1..20: note = HBV-targeting guide sequence portion
  source 1..20: mol_type = other RNA
caaggtaggagctggagcat

SEQ ID NO: 1708 - RNA, 20 nt, synthetic construct
  misc_feature 1..20: note = HBV-targeting guide sequence portion
  source 1..20: mol_type = other RNA
caaggtatgtttcccgtctg

SEQ ID NO: 1709 - RNA, 20 nt, synthetic construct
  misc_feature 1..20: note = HBV-targeting guide sequence portion
  source 1..20: mol_type = other RNA
caaggtcggtcgttgacatt

SEQ ID NO: 1710 - RNA, 20 nt, synthetic construct
  misc_feature 1..20: note = HBV-targeting guide sequence portion
  source 1..20: mol_type = other RNA
caaggtcttacataagagga

SEQ ID NO: 1711 - RNA, 20 nt, synthetic construct
  misc_feature 1..20: note = HBV-targeting guide sequence portion
  source 1..20: mol_type = other RNA
caaggtttgcattatgccct

SEQ ID NO: 1712 - RNA, 20 nt, synthetic construct
  misc_feature 1..20: note = HBV-targeting guide sequence portion
  source 1..20: mol_type = other RNA
caagtatttggtgaatttag

SEQ ID NO: 1713 - RNA, 20 nt, synthetic construct
  misc_feature 1..20: note = HBV-targeting guide sequence portion
  source 1..20: mol_type = other RNA
caagtctccggaagtgttga

SEQ ID NO: 1714 - RNA, 20 nt, synthetic construct
  misc_feature 1..20: note = HBV-targeting guide sequence portion
  source 1..20: mol_type = other RNA
caagtctgtacagcatcttg

SEQ ID NO: 1715 - RNA, 20 nt, synthetic construct
  misc_feature 1..20: note = HBV-targeting guide sequence portion
  source 1..20: mol_type = other RNA
caagtgtttgctgatgcaac

SEQ ID NO: 1716 - RNA, 20 nt, synthetic construct
  misc_feature 1..20: note = HBV-targeting guide sequence portion
  source 1..20: mol_type = other RNA
caagttggaggacaggaggt

SEQ ID NO: 1717 - RNA, 20 nt, synthetic construct
  misc_feature 1..20: note = HBV-targeting guide sequence portion
  source 1..20: mol_type = other RNA
caataccacatcatccatat

SEQ ID NO: 1718 - RNA, 20 nt, synthetic construct
  misc_feature 1..20: note = HBV-targeting guide sequence portion
  source 1..20: mol_type = other RNA
caataccgcagagtctagac

SEQ ID NO: 1719 - RNA, 20 nt, synthetic construct
  misc_feature 1..20: note = HBV-targeting guide sequence portion
  source 1..20: mol_type = other RNA
caatacctgaacctttaccc

SEQ ID NO: 1720 - RNA, 20 nt, synthetic construct
  misc_feature 1..20: note = HBV-targeting guide sequence portion
  source 1..20: mol_type = other RNA
caataggcctgttaaccggg

SEQ ID NO: 1721 - RNA, 20 nt, synthetic construct
  misc_feature 1..20: note = HBV-targeting guide sequence portion
  source 1..20: mol_type = other RNA
caatagttgtctgaacttta

SEQ ID NO: 1722 - RNA, 20 nt, synthetic construct
  misc_feature 1..20: note = HBV-targeting guide sequence portion
  source 1..20: mol_type = other RNA
caatcaataggcctgttaac

SEQ ID NO: 1723 - RNA, 20 nt, synthetic construct
  misc_feature 1..20: note = HBV-targeting guide sequence portion
  source 1..20: mol_type = other RNA
caatcaatgacatagcccat

SEQ ID NO: 1724 - RNA, 20 nt, synthetic construct
  misc_feature 1..20: note = HBV-targeting guide sequence portion
  source 1..20: mol_type = other RNA
caatcactcaccaacctcct

SEQ ID NO: 1725 - RNA, 20 nt, synthetic construct
  misc_feature 1..20: note = HBV-targeting guide sequence portion
  source 1..20: mol_type = other RNA
caatccagattgggacttca

SEQ ID NO: 1726 - RNA, 20 nt, synthetic construct
  misc_feature 1..20: note = HBV-targeting guide sequence portion
  source 1..20: mol_type = other RNA
caatcccaacaaggatccct

SEQ ID NO: 1727 - RNA, 20 nt, synthetic construct
  misc_feature 1..20: note = HBV-targeting guide sequence portion
  source 1..20: mol_type = other RNA
caatcctcgagaagattgac

SEQ ID NO: 1728 - RNA, 20 nt, synthetic construct
  misc_feature 1..20: note = HBV-targeting guide sequence portion
  source 1..20: mol_type = other RNA
caatcctctgggattctttc

SEQ ID NO: 1729 - RNA, 20 nt, synthetic construct
  misc_feature 1..20: note = HBV-targeting guide sequence portion
  source 1..20: mol_type = other RNA
caatcgccagtcaggacggc

SEQ ID NO: 1730 - RNA, 20 nt, synthetic construct
  misc_feature 1..20: note = HBV-targeting guide sequence portion
  source 1..20: mol_type = other RNA
caatcgccgcgtcgcagaag

SEQ ID NO: 1731 - RNA, 20 nt, synthetic construct
  misc_feature 1..20: note = HBV-targeting guide sequence portion
  source 1..20: mol_type = other RNA
caatctaagcaggctttcac

SEQ ID NO: 1732 - RNA, 20 nt, synthetic construct
  misc_feature 1..20: note = HBV-targeting guide sequence portion
  source 1..20: mol_type = other RNA
caatctcggggatctcaatg

SEQ ID NO: 1733 - RNA, 20 nt, synthetic construct
  misc_feature 1..20: note = HBV-targeting guide sequence portion
  source 1..20: mol_type = other RNA
caatctggattgttggagtt

SEQ ID NO: 1734 - RNA, 20 nt, synthetic construct
  misc_feature 1..20: note = HBV-targeting guide sequence portion
  source 1..20: mol_type = other RNA
caatcttctcgaggattggg

SEQ ID NO: 1735 - RNA, 20 nt, synthetic construct
  misc_feature 1..20: note = HBV-targeting guide sequence portion
  source 1..20: mol_type = other RNA
caatgacatagcccatgaaa

SEQ ID NO: 1736 - RNA, 20 nt, synthetic construct
  misc_feature 1..20: note = HBV-targeting guide sequence portion
  source 1..20: mol_type = other RNA
caatgagggttaaagacagg

SEQ ID NO: 1737 - RNA, 20 nt, synthetic construct
  misc_feature 1..20: note = HBV-targeting guide sequence portion
  source 1..20: mol_type = other RNA
caatgatccccaacaatcaa

SEQ ID NO: 1738 - RNA, 20 nt, synthetic construct
  misc_feature 1..20: note = HBV-targeting guide sequence portion
  source 1..20: mol_type = other RNA
caatgctcaggagactccaa

SEQ ID NO: 1739 - RNA, 20 nt, synthetic construct
  misc_feature 1..20: note = HBV-targeting guide sequence portion
  source 1..20: mol_type = other RNA
caatgtcaacgaccgacctt

SEQ ID NO: 1740 - RNA, 20 nt, synthetic construct
  misc_feature 1..20: note = HBV-targeting guide sequence portion
  source 1..20: mol_type = other RNA
caatgtccatgccctaaagc

SEQ ID NO: 1741 - RNA, 20 nt, synthetic construct
  misc_feature 1..20: note = HBV-targeting guide sequence portion
  source 1..20: mol_type = other RNA
caatgtggttatcctgcttt

SEQ ID NO: 1742 - RNA, 20 nt, synthetic construct
  misc_feature 1..20: note = HBV-targeting guide sequence portion
  source 1..20: mol_type = other RNA
caatgttagtatcccttgga

SEQ ID NO: 1743 - RNA, 20 nt, synthetic construct
  misc_feature 1..20: note = HBV-targeting guide sequence portion
  source 1..20: mol_type = other RNA
caattcgttgacacactttc

SEQ ID NO: 1744 - RNA, 20 nt, synthetic construct
  misc_feature 1..20: note = HBV-targeting guide sequence portion
  source 1..20: mol_type = other RNA
caattcttgcccaaggtctt

SEQ ID NO: 1745 - RNA, 20 nt, synthetic construct
  misc_feature 1..20: note = HBV-targeting guide sequence portion
  source 1..20: mol_type = other RNA
caattctttgctggggagaa

SEQ ID NO: 1746 - RNA, 20 nt, synthetic construct
  misc_feature 1..20: note = HBV-targeting guide sequence portion
  source 1..20: mol_type = other RNA
caatttatgcctacagcctc

SEQ ID NO: 1747 - RNA, 20 nt, synthetic construct
  misc_feature 1..20: note = HBV-targeting guide sequence portion
  source 1..20: mol_type = other RNA
caatttcaaccgtcttttct

SEQ ID NO: 1748 - RNA, 20 nt, synthetic construct
  misc_feature 1..20: note = HBV-targeting guide sequence portion
  source 1..20: mol_type = other RNA
caattttctagggggaacta

SEQ ID NO: 1749 - RNA, 20 nt, synthetic construct
  misc_feature 1..20: note = HBV-targeting guide sequence portion
  source 1..20: mol_type = other RNA
caattttcttttgtctttgg

SEQ ID NO: 1750 - RNA, 20 nt, synthetic construct
  misc_feature 1..20: note = HBV-targeting guide sequence portion
  source 1..20: mol_type = other RNA
cacaaaatcaaagaatgttt

SEQ ID NO: 1751 - RNA, 20 nt, synthetic construct
  misc_feature 1..20: note = HBV-targeting guide sequence portion
  source 1..20: mol_type = other RNA
cacaaaatcacatcatacac

SEQ ID NO: 1752 - RNA, 20 nt, synthetic construct
  misc_feature 1..20: note = HBV-targeting guide sequence portion
  source 1..20: mol_type = other RNA
cacaaccttccaccaaactc

SEQ ID NO: 1753 - RNA, 20 nt, synthetic construct
  misc_feature 1..20: note = HBV-targeting guide sequence portion
  source 1..20: mol_type = other RNA
cacaagtctccggaagtgtt

SEQ ID NO: 1754 - RNA, 20 nt, synthetic construct
  misc_feature 1..20: note = HBV-targeting guide sequence portion
  source 1..20: mol_type = other RNA
cacaataccgcagagtctag

SEQ ID NO: 1755 - RNA, 20 nt, synthetic construct
  misc_feature 1..20: note = HBV-targeting guide sequence portion
  source 1..20: mol_type = other RNA
cacaatagttgtctgaactt

SEQ ID NO: 1756 - RNA, 20 nt, synthetic construct
  misc_feature 1..20: note = HBV-targeting guide sequence portion
  source 1..20: mol_type = other RNA
cacaatgtggttatcctgct

SEQ ID NO: 1757 - RNA, 20 nt, synthetic construct
  misc_feature 1..20: note = HBV-targeting guide sequence portion
  source 1..20: mol_type = other RNA
cacaattcgttgacacactt

SEQ ID NO: 1758 - RNA, 20 nt, synthetic construct
  misc_feature 1..20: note = HBV-targeting guide sequence portion
  source 1..20: mol_type = other RNA
cacacggtagttccccctag

SEQ ID NO: 1759 - RNA, 20 nt, synthetic construct
  misc_feature 1..20: note = HBV-targeting guide sequence portion
  source 1..20: mol_type = other RNA
cacacggtccggcagatgag

SEQ ID NO: 1760 - RNA, 20 nt, synthetic construct
  misc_feature 1..20: note = HBV-targeting guide sequence portion
  source 1..20: mol_type = other RNA
cacactccaaaagacaccaa

SEQ ID NO: 1761 - RNA, 20 nt, synthetic construct
  misc_feature 1..20: note = HBV-targeting guide sequence portion
  source 1..20: mol_type = other RNA
cacactctatggaaggcggg

SEQ ID NO: 1762 - RNA, 20 nt, synthetic construct
  misc_feature 1..20: note = HBV-targeting guide sequence portion
  source 1..20: mol_type = other RNA
cacactttccaatcaatagg

SEQ ID NO: 1763 - RNA, 20 nt, synthetic construct
  misc_feature 1..20: note = HBV-targeting guide sequence portion
  source 1..20: mol_type = other RNA
cacagaaaggccttgtaagt

SEQ ID NO: 1764 - RNA, 20 nt, synthetic construct
  misc_feature 1..20: note = HBV-targeting guide sequence portion
  source 1..20: mol_type = other RNA
cacagaatgaggcgctatgt

SEQ ID NO: 1765 - RNA, 20 nt, synthetic construct
  misc_feature 1..20: note = HBV-targeting guide sequence portion
  source 1..20: mol_type = other RNA
cacagacctggccgttgcct

SEQ ID NO: 1766 - RNA, 20 nt, synthetic construct
  misc_feature 1..20: note = HBV-targeting guide sequence portion
  source 1..20: mol_type = other RNA
cacagacggggagtccgcgt

SEQ ID NO: 1767 - RNA, 20 nt, synthetic construct
  misc_feature 1..20: note = HBV-targeting guide sequence portion
  source 1..20: mol_type = other RNA
cacagcctagcagccatggg

SEQ ID NO: 1768 - RNA, 20 nt, synthetic construct
  misc_feature 1..20: note = HBV-targeting guide sequence portion
  source 1..20: mol_type = other RNA
cacagcttggaggcttgaac

SEQ ID NO: 1769 - RNA, 20 nt, synthetic construct
  misc_feature 1..20: note = HBV-targeting guide sequence portion
  source 1..20: mol_type = other RNA
cacagtagctccaaattctt

SEQ ID NO: 1770 - RNA, 20 nt, synthetic construct
  misc_feature 1..20: note = HBV-targeting guide sequence portion
  source 1..20: mol_type = other RNA
cacatagcgcctcattctgt

SEQ ID NO: 1771 - RNA, 20 nt, synthetic construct
  misc_feature 1..20: note = HBV-targeting guide sequence portion
  source 1..20: mol_type = other RNA
cacatatcgtcaatcttctc

SEQ ID NO: 1772 - RNA, 20 nt, synthetic construct
  misc_feature 1..20: note = HBV-targeting guide sequence portion
  source 1..20: mol_type = other RNA
cacatcaggattcctaggac

SEQ ID NO: 1773 - RNA, 20 nt, synthetic construct
  misc_feature 1..20: note = HBV-targeting guide sequence portion
  source 1..20: mol_type = other RNA
cacatcatacacaaaatcaa

SEQ ID NO: 1774 - RNA, 20 nt, synthetic construct
  misc_feature 1..20: note = HBV-targeting guide sequence portion
  source 1..20: mol_type = other RNA
cacatcatccatataactga

SEQ ID NO: 1775 - RNA, 20 nt, synthetic construct
  misc_feature 1..20: note = HBV-targeting guide sequence portion
  source 1..20: mol_type = other RNA
cacatccagcgataaccagg

SEQ ID NO: 1776 - RNA, 20 nt, synthetic construct
  misc_feature 1..20: note = HBV-targeting guide sequence portion
  source 1..20: mol_type = other RNA
cacattgtgtaaaaggggca

SEQ ID NO: 1777 - RNA, 20 nt, synthetic construct
  misc_feature 1..20: note = HBV-targeting guide sequence portion
  source 1..20: mol_type = other RNA
cacatttcttgtcttacttt

SEQ ID NO: 1778 - RNA, 20 nt, synthetic construct
  misc_feature 1..20: note = HBV-targeting guide sequence portion
  source 1..20: mol_type = other RNA
cacattttttgataatatct

SEQ ID NO: 1779 - RNA, 20 nt, synthetic construct
  misc_feature 1..20: note = HBV-targeting guide sequence portion
  source 1..20: mol_type = other RNA
caccaaactctgcaagatcc

SEQ ID NO: 1780 - RNA, 20 nt, synthetic construct
  misc_feature 1..20: note = HBV-targeting guide sequence portion
  source 1..20: mol_type = other RNA
caccaaatactctaggaccg

SEQ ID NO: 1781 - RNA, 20 nt, synthetic construct
  misc_feature 1..20: note = HBV-targeting guide sequence portion
  source 1..20: mol_type = other RNA
caccaaatacttgcccttgg

SEQ ID NO: 1782 - RNA, 20 nt, synthetic construct
  misc_feature 1..20: note = HBV-targeting guide sequence portion
  source 1..20: mol_type = other RNA
caccaaatgcccctatccta

SEQ ID NO: 1783 - RNA, 20 nt, synthetic construct
  misc_feature 1..20: note = HBV-targeting guide sequence portion
  source 1..20: mol_type = other RNA
caccaacctcctgtcctcca

SEQ ID NO: 1784 - RNA, 20 nt, synthetic construct
  misc_feature 1..20: note = HBV-targeting guide sequence portion
  source 1..20: mol_type = other RNA
caccaagatattatcaaaaa

SEQ ID NO: 1785 - RNA, 20 nt, synthetic construct
  misc_feature 1..20: note = HBV-targeting guide sequence portion
  source 1..20: mol_type = other RNA
caccaattcttgcccaaggt

SEQ ID NO: 1786 - RNA, 20 nt, synthetic construct
  misc_feature 1..20: note = HBV-targeting guide sequence portion
  source 1..20: mol_type = other RNA
caccacgagtctagactctg

SEQ ID NO: 1787 - RNA, 20 nt, synthetic construct
  misc_feature 1..20: note = HBV-targeting guide sequence portion
  source 1..20: mol_type = other RNA
caccagcaatcctctgggat

SEQ ID NO: 1788 - RNA, 20 nt, synthetic construct
  misc_feature 1..20: note = HBV-targeting guide sequence portion
  source 1..20: mol_type = other RNA
caccagcaccatgcaacttt

SEQ ID NO: 1789 - RNA, 20 nt, synthetic construct
  misc_feature 1..20: note = HBV-targeting guide sequence portion
  source 1..20: mol_type = other RNA
caccagcacgggaccctgca

SEQ ID NO: 1790 - RNA, 20 nt, synthetic construct
  misc_feature 1..20: note = HBV-targeting guide sequence portion
  source 1..20: mol_type = other RNA
caccagcagggagatacagg

SEQ ID NO: 1791 - RNA, 20 nt, synthetic construct
  misc_feature 1..20: note = HBV-targeting guide sequence portion
  source 1..20: mol_type = other RNA
caccagttggacccagcctt

SEQ ID NO: 1792 - RNA, 20 nt, synthetic construct
  misc_feature 1..20: note = HBV-targeting guide sequence portion
  source 1..20: mol_type = other RNA
caccatactgcactcaggca

SEQ ID NO: 1793 - RNA, 20 nt, synthetic construct
  misc_feature 1..20: note = HBV-targeting guide sequence portion
  source 1..20: mol_type = other RNA
caccatattcttgggaacaa

SEQ ID NO: 1794 - RNA, 20 nt, synthetic construct
  misc_feature 1..20: note = HBV-targeting guide sequence portion
  source 1..20: mol_type = other RNA
caccatgcaactttttcacc

SEQ ID NO: 1795 - RNA, 20 nt, synthetic construct
  misc_feature 1..20: note = HBV-targeting guide sequence portion
  source 1..20: mol_type = other RNA
cacccaaagacaaaagaaaa

SEQ ID NO: 1796 - RNA, 20 nt, synthetic construct
  misc_feature 1..20: note = HBV-targeting guide sequence portion
  source 1..20: mol_type = other RNA
cacccaaggcacagcttgga

SEQ ID NO: 1797 - RNA, 20 nt, synthetic construct
  misc_feature 1..20: note = HBV-targeting guide sequence portion
  source 1..20: mol_type = other RNA
cacccaggtagctagagtca

SEQ ID NO: 1798 - RNA, 20 nt, synthetic construct
  misc_feature 1..20: note = HBV-targeting guide sequence portion
  source 1..20: mol_type = other RNA
caccccaaaaggcctccgtg

SEQ ID NO: 1799 - RNA, 20 nt, synthetic construct
  misc_feature 1..20: note = HBV-targeting guide sequence portion
  source 1..20: mol_type = other RNA
caccccaccgcacggaggcc

SEQ ID NO: 1800 - RNA, 20 nt, synthetic construct
  misc_feature 1..20: note = HBV-targeting guide sequence portion
  source 1..20: mol_type = other RNA
cacccgccttccatagagtg

SEQ ID NO: 1801 - RNA, 20 nt, synthetic construct
  misc_feature 1..20: note = HBV-targeting guide sequence portion
  source 1..20: mol_type = other RNA
caccctcttttcctaatata

SEQ ID NO: 1802 - RNA, 20 nt, synthetic construct
  misc_feature 1..20: note = HBV-targeting guide sequence portion
  source 1..20: mol_type = other RNA
caccgcacggaggccttttg

SEQ ID NO: 1803 - RNA, 20 nt, synthetic construct
  misc_feature 1..20: note = HBV-targeting guide sequence portion
  source 1..20: mol_type = other RNA
caccgtgaacgcccaccaat

SEQ ID NO: 1804 - RNA, 20 nt, synthetic construct
  misc_feature 1..20: note = HBV-targeting guide sequence portion
  source 1..20: mol_type = other RNA
cacctcaccatactgcactc

SEQ ID NO: 1805 - RNA, 20 nt, synthetic construct
  misc_feature 1..20: note = HBV-targeting guide sequence portion
  source 1..20: mol_type = other RNA
cacctctctttacgcggact

SEQ ID NO: 1806 - RNA, 20 nt, synthetic construct
  misc_feature 1..20: note = HBV-targeting guide sequence portion
  source 1..20: mol_type = other RNA
cacctctgagaaacactcat

SEQ ID NO: 1807 - RNA, 20 nt, synthetic construct
  misc_feature 1..20: note = HBV-targeting guide sequence portion
  source 1..20: mol_type = other RNA
cacctctgcacgtcgcatgg

SEQ ID NO: 1808 - RNA, 20 nt, synthetic construct
  misc_feature 1..20: note = HBV-targeting guide sequence portion
  source 1..20: mol_type = other RNA
cacctctgcctaatcatctc

SEQ ID NO: 1809 - RNA, 20 nt, synthetic construct
  misc_feature 1..20: note = HBV-targeting guide sequence portion
  source 1..20: mol_type = other RNA
cacctgtattcccatcccat

SEQ ID NO: 1810 - RNA, 20 nt, synthetic construct
  misc_feature 1..20: note = HBV-targeting guide sequence portion
  source 1..20: mol_type = other RNA
caccttatgagtccaaggga

SEQ ID NO: 1811 - RNA, 20 nt, synthetic construct
  misc_feature 1..20: note = HBV-targeting guide sequence portion
  source 1..20: mol_type = other RNA
cacgactcctgctcaaggaa

SEQ ID NO: 1812 - RNA, 20 nt, synthetic construct
  misc_feature 1..20: note = HBV-targeting guide sequence portion
  source 1..20: mol_type = other RNA
cacgagcaggggtcctagga

SEQ ID NO: 1813 - RNA, 20 nt, synthetic construct
  misc_feature 1..20: note = HBV-targeting guide sequence portion
  source 1..20: mol_type = other RNA
cacgagtctagactctgcgg

SEQ ID NO: 1814 - RNA, 20 nt, synthetic construct
  misc_feature 1..20: note = HBV-targeting guide sequence portion
  source 1..20: mol_type = other RNA
cacgcatgcgctgatggcct

SEQ ID NO: 1815 - RNA, 20 nt, synthetic construct
  misc_feature 1..20: note = HBV-targeting guide sequence portion
  source 1..20: mol_type = other RNA
cacggaggccttttggggtg

SEQ ID NO: 1816 - RNA, 20 nt, synthetic construct
  misc_feature 1..20: note = HBV-targeting guide sequence portion
  source 1..20: mol_type = other RNA
cacgggaccctgcagaacct

SEQ ID NO: 1817 - RNA, 20 nt, synthetic construct
  misc_feature 1..20: note = HBV-targeting guide sequence portion
  source 1..20: mol_type = other RNA
cacggggcgcacctctcttt

SEQ ID NO: 1818 - RNA, 20 nt, synthetic construct
  misc_feature 1..20: note = HBV-targeting guide sequence portion
  source 1..20: mol_type = other RNA
cacggtagttccccctagaa

SEQ ID NO: 1819 - RNA, 20 nt, synthetic construct
  misc_feature 1..20: note = HBV-targeting guide sequence portion
  source 1..20: mol_type = other RNA
cacggtccggcagatgagaa

SEQ ID NO: 1820 - RNA, 20 nt, synthetic construct
  misc_feature 1..20: note = HBV-targeting guide sequence portion
  source 1..20: mol_type = other RNA
cacggtggtctccatgcgac

SEQ ID NO: 1821 - RNA, 20 nt, synthetic construct
  misc_feature 1..20: note = HBV-targeting guide sequence portion
  source 1..20: mol_type = other RNA
cacgtcgcatggagaccacc

SEQ ID NO: 1822 - RNA, 20 nt, synthetic construct
  misc_feature 1..20: note = HBV-targeting guide sequence portion
  source 1..20: mol_type = other RNA
cactagtaaactgagccaag

SEQ ID NO: 1823 - RNA, 20 nt, synthetic construct
  misc_feature 1..20: note = HBV-targeting guide sequence portion
  source 1..20: mol_type = other RNA
cactatttacacactctatg

SEQ ID NO: 1824 - RNA, 20 nt, synthetic construct
  misc_feature 1..20: note = HBV-targeting guide sequence portion
  source 1..20: mol_type = other RNA
cactcaccaacctcctgtcc

SEQ ID NO: 1825 - RNA, 20 nt, synthetic construct
  misc_feature 1..20: note = HBV-targeting guide sequence portion
  source 1..20: mol_type = other RNA
cactcaggcaagcaattctt

SEQ ID NO: 1826 - RNA, 20 nt, synthetic construct
  misc_feature 1..20: note = HBV-targeting guide sequence portion
  source 1..20: mol_type = other RNA
cactcatatgggcctaaagt

SEQ ID NO: 1827 - RNA, 20 nt, synthetic construct
  misc_feature 1..20: note = HBV-targeting guide sequence portion
  source 1..20: mol_type = other RNA
cactccaaaagacaccaaat

SEQ ID NO: 1828 - RNA, 20 nt, synthetic construct
  misc_feature 1..20: note = HBV-targeting guide sequence portion
  source 1..20: mol_type = other RNA
cactcccataggaattttcc

SEQ ID NO: 1829 - RNA, 20 nt, synthetic construct
  misc_feature 1..20: note = HBV-targeting guide sequence portion
  source 1..20: mol_type = other RNA
cactcctccagcttatagac

SEQ ID NO: 1830 - RNA, 20 nt, synthetic construct
  misc_feature 1..20: note = HBV-targeting guide sequence portion
  source 1..20: mol_type = other RNA
cactctatggaaggcgggtg

SEQ ID NO: 1831 - RNA, 20 nt, synthetic construct
  misc_feature 1..20: note = HBV-targeting guide sequence portion
  source 1..20: mol_type = other RNA
cactctcttatataaaacac

SEQ ID NO: 1832 - RNA, 20 nt, synthetic construct
  misc_feature 1..20: note = HBV-targeting guide sequence portion
  source 1..20: mol_type = other RNA
cactctgggatcttgcagag

SEQ ID NO: 1833 - RNA, 20 nt, synthetic construct
  misc_feature 1..20: note = HBV-targeting guide sequence portion
  source 1..20: mol_type = other RNA
cactgaacaaatggcactag

SEQ ID NO: 1834 - RNA, 20 nt, synthetic construct
  misc_feature 1..20: note = HBV-targeting guide sequence portion
  source 1..20: mol_type = other RNA
cactgcatggcctgaggatg

SEQ ID NO: 1835 - RNA, 20 nt, synthetic construct
  misc_feature 1..20: note = HBV-targeting guide sequence portion
  source 1..20: mol_type = other RNA
cactggttggggcttggtca

SEQ ID NO: 1836 - RNA, 20 nt, synthetic construct
  misc_feature 1..20: note = HBV-targeting guide sequence portion
  source 1..20: mol_type = other RNA
cactgtttggctttcagtta

SEQ ID NO: 1837 - RNA, 20 nt, synthetic construct
  misc_feature 1..20: note = HBV-targeting guide sequence portion
  source 1..20: mol_type = other RNA
cacttccggagacttgtgtt

SEQ ID NO: 1838 - RNA, 20 nt, synthetic construct
  misc_feature 1..20: note = HBV-targeting guide sequence portion
  source 1..20: mol_type = other RNA
cacttcgcttcacctctgca

SEQ ID NO: 1839 - RNA, 20 nt, synthetic construct
  misc_feature 1..20: note = HBV-targeting guide sequence portion
  source 1..20: mol_type = other RNA
cacttggcacagacctggcc

SEQ ID NO: 1840 - RNA, 20 nt, synthetic construct
  misc_feature 1..20: note = HBV-targeting guide sequence portion
  source 1..20: mol_type = other RNA
cactttccaatcaataggcc

SEQ ID NO: 1841 - RNA, 20 nt, synthetic construct
  misc_feature 1..20: note = HBV-targeting guide sequence portion
  source 1..20: mol_type = other RNA
cactttttcgccaacttaca

SEQ ID NO: 1842 - RNA, 20 nt, synthetic construct
  misc_feature 1..20: note = HBV-targeting guide sequence portion
  source 1..20: mol_type = other RNA
cagaaaactcccggttaaca

SEQ ID NO: 1843 - RNA, 20 nt, synthetic construct
  misc_feature 1..20: note = HBV-targeting guide sequence portion
  source 1..20: mol_type = other RNA
cagaaaggccttgtaagttg

SEQ ID NO: 1844 - RNA, 20 nt, synthetic construct
  misc_feature 1..20: note = HBV-targeting guide sequence portion
  source 1..20: mol_type = other RNA
cagaacatctagttaatcat

SEQ ID NO: 1845 - RNA, 20 nt, synthetic construct
  misc_feature 1..20: note = HBV-targeting guide sequence portion
  source 1..20: mol_type = other RNA
cagaacctgcacgactcctg

SEQ ID NO: 1846 - RNA, 20 nt, synthetic construct
  misc_feature 1..20: note = HBV-targeting guide sequence portion
  source 1..20: mol_type = other RNA
cagaagaaccaacaagaaga

SEQ ID NO: 1847 - RNA, 20 nt, synthetic construct
  misc_feature 1..20: note = HBV-targeting guide sequence portion
  source 1..20: mol_type = other RNA
cagaagacccacaattcgtt

SEQ ID NO: 1848 - RNA, 20 nt, synthetic construct
  misc_feature 1..20: note = HBV-targeting guide sequence portion
  source 1..20: mol_type = other RNA
cagaagatctcaatctcggg

SEQ ID NO: 1849 - RNA, 20 nt, synthetic construct
  misc_feature 1..20: note = HBV-targeting guide sequence portion
  source 1..20: mol_type = other RNA
cagaaggcaaaaacgagagt

SEQ ID NO: 1850 - RNA, 20 nt, synthetic construct
  misc_feature 1..20: note = HBV-targeting guide sequence portion
  source 1..20: mol_type = other RNA
cagaatctttccaccagcaa

SEQ ID NO: 1851 - RNA, 20 nt, synthetic construct
  misc_feature 1..20: note = HBV-targeting guide sequence portion
  source 1..20: mol_type = other RNA
cagaatgaggcgctatgtgt

SEQ ID NO: 1852 - RNA, 20 nt, synthetic construct
  misc_feature 1..20: note = HBV-targeting guide sequence portion
  source 1..20: mol_type = other RNA
cagacaactattgtggtttc

SEQ ID NO: 1853 - RNA, 20 nt, synthetic construct
  misc_feature 1..20: note = HBV-targeting guide sequence portion
  source 1..20: mol_type = other RNA
cagacacatccagcgataac

SEQ ID NO: 1854 - RNA, 20 nt, synthetic construct
  misc_feature 1..20: note = HBV-targeting guide sequence portion
  source 1..20: mol_type = other RNA
cagaccaatttatgcctaca

SEQ ID NO: 1855 - RNA, 20 nt, synthetic construct
  misc_feature 1..20: note = HBV-targeting guide sequence portion
  source 1..20: mol_type = other RNA
cagaccggctgcgagcaaaa

SEQ ID NO: 1856 - RNA, 20 nt, synthetic construct
  misc_feature 1..20: note = HBV-targeting guide sequence portion
  source 1..20: mol_type = other RNA
cagacctggccgttgcctgg

SEQ ID NO: 1857 - RNA, 20 nt, synthetic construct
  misc_feature 1..20: note = HBV-targeting guide sequence portion
  source 1..20: mol_type = other RNA
cagacgaagatctcaatcgc

SEQ ID NO: 1858 - RNA, 20 nt, synthetic construct
  misc_feature 1..20: note = HBV-targeting guide sequence portion
  source 1..20: mol_type = other RNA
cagacgccaacaaggtagga

SEQ ID NO: 1859 - RNA, 20 nt, synthetic construct
  misc_feature 1..20: note = HBV-targeting guide sequence portion
  source 1..20: mol_type = other RNA
cagacgggaaacataccttg

SEQ ID NO: 1860 - RNA, 20 nt, synthetic construct
  misc_feature 1..20: note = HBV-targeting guide sequence portion
  source 1..20: mol_type = other RNA
cagacggggagtccgcgtaa

SEQ ID NO: 1861 - RNA, 20 nt, synthetic construct
  misc_feature 1..20: note = HBV-targeting guide sequence portion
  source 1..20: mol_type = other RNA
cagacttggcccccaatacc

SEQ ID NO: 1862 - RNA, 20 nt, synthetic construct
  misc_feature 1..20: note = HBV-targeting guide sequence portion
  source 1..20: mol_type = other RNA
cagagaagaggacgacaggg

SEQ ID NO: 1863 - RNA, 20 nt, synthetic construct
  misc_feature 1..20: note = HBV-targeting guide sequence portion
  source 1..20: mol_type = other RNA
cagagagtccaagagtcctc

SEQ ID NO: 1864 - RNA, 20 nt, synthetic construct
  misc_feature 1..20: note = HBV-targeting guide sequence portion
  source 1..20: mol_type = other RNA
cagagcaaactccaacaatc

SEQ ID NO: 1865 - RNA, 20 nt, synthetic construct
  misc_feature 1..20: note = HBV-targeting guide sequence portion
  source 1..20: mol_type = other RNA
cagagctgcggcggtatcta

SEQ ID NO: 1866 - RNA, 20 nt, synthetic construct
  misc_feature 1..20: note = HBV-targeting guide sequence portion
  source 1..20: mol_type = other RNA
cagaggagccggaaaggttc

SEQ ID NO: 1867 - RNA, 20 nt, synthetic construct
  misc_feature 1..20: note = HBV-targeting guide sequence portion
  source 1..20: mol_type = other RNA
cagaggattgctggtggaaa

SEQ ID NO: 1868 - RNA, 20 nt, synthetic construct
  misc_feature 1..20: note = HBV-targeting guide sequence portion
  source 1..20: mol_type = other RNA
cagaggtgaaaaagttgcat

SEQ ID NO: 1869 - RNA, 20 nt, synthetic construct
  misc_feature 1..20: note = HBV-targeting guide sequence portion
  source 1..20: mol_type = other RNA
cagaggtgaagcgaagtgca

SEQ ID NO: 1870 - RNA, 20 nt, synthetic construct
  misc_feature 1..20: note = HBV-targeting guide sequence portion
  source 1..20: mol_type = other RNA
cagaggtggagacagcgggg

SEQ ID NO: 1871 - RNA, 20 nt, synthetic construct
  misc_feature 1..20: note = HBV-targeting guide sequence portion
  source 1..20: mol_type = other RNA
cagagtctagactcgtggtg

SEQ ID NO: 1872 - RNA, 20 nt, synthetic construct
  misc_feature 1..20: note = HBV-targeting guide sequence portion
  source 1..20: mol_type = other RNA
cagagtgagaggcctgtatc

SEQ ID NO: 1873 - RNA, 20 nt, synthetic construct
  misc_feature 1..20: note = HBV-targeting guide sequence portion
  source 1..20: mol_type = other RNA
cagagttgtcagtcccgaga

SEQ ID NO: 1874 - RNA, 20 nt, synthetic construct
  misc_feature 1..20: note = HBV-targeting guide sequence portion
  source 1..20: mol_type = other RNA
cagagtttggtggaaggttg

SEQ ID NO: 1875 - RNA, 20 nt, synthetic construct
  misc_feature 1..20: note = HBV-targeting guide sequence portion
  source 1..20: mol_type = other RNA
cagatgagaaggcacagacg

SEQ ID NO: 1876 - RNA, 20 nt, synthetic construct
  misc_feature 1..20: note = HBV-targeting guide sequence portion
  source 1..20: mol_type = other RNA
cagattgggacttcaatccc

SEQ ID NO: 1877 - RNA, 20 nt, synthetic construct
  misc_feature 1..20: note = HBV-targeting guide sequence portion
  source 1..20: mol_type = other RNA
cagcaaaacccagaagaccc

SEQ ID NO: 1878 - RNA, 20 nt, synthetic construct
  misc_feature 1..20: note = HBV-targeting guide sequence portion
  source 1..20: mol_type = other RNA
cagcaaacacttggcacaga

SEQ ID NO: 1879 - RNA, 20 nt, synthetic construct
  misc_feature 1..20: note = HBV-targeting guide sequence portion
  source 1..20: mol_type = other RNA
cagcaaagaattgcttgcct

SEQ ID NO: 1880 - RNA, 20 nt, synthetic construct
  misc_feature 1..20: note = HBV-targeting guide sequence portion
  source 1..20: mol_type = other RNA
cagcaaatccgcctcctgcc

SEQ ID NO: 1881 - RNA, 20 nt, synthetic construct
  misc_feature 1..20: note = HBV-targeting guide sequence portion
  source 1..20: mol_type = other RNA
cagcaacaggagggatacat

SEQ ID NO: 1882 - RNA, 20 nt, synthetic construct
  misc_feature 1..20: note = HBV-targeting guide sequence portion
  source 1..20: mol_type = other RNA
cagcaatcctctgggattct

SEQ ID NO: 1883 - RNA, 20 nt, synthetic construct
  misc_feature 1..20: note = HBV-targeting guide sequence portion
  source 1..20: mol_type = other RNA
cagcacagcctagcagccat

SEQ ID NO: 1884 - RNA, 20 nt, synthetic construct
  misc_feature 1..20: note = HBV-targeting guide sequence portion
  source 1..20: mol_type = other RNA
cagcaccatgcaactttttc

SEQ ID NO: 1885 - RNA, 20 nt, synthetic construct
  misc_feature 1..20: note = HBV-targeting guide sequence portion
  source 1..20: mol_type = other RNA
cagcacgggaccctgcagaa

SEQ ID NO: 1886 - RNA, 20 nt, synthetic construct
  misc_feature 1..20: note = HBV-targeting guide sequence portion
  source 1..20: mol_type = other RNA
cagcaggatgaagaggaaga

SEQ ID NO: 1887 - RNA, 20 nt, synthetic construct
  misc_feature 1..20: note = HBV-targeting guide sequence portion
  source 1..20: mol_type = other RNA
cagcagggagatacaggcct

SEQ ID NO: 1888 - RNA, 20 nt, synthetic construct
  misc_feature 1..20: note = HBV-targeting guide sequence portion
  source 1..20: mol_type = other RNA
cagcatcttgagtcccttta

SEQ ID NO: 1889 - RNA, 20 nt, synthetic construct
  misc_feature 1..20: note = HBV-targeting guide sequence portion
  source 1..20: mol_type = other RNA
cagcatggggcagaatcttt

SEQ ID NO: 1890 - RNA, 20 nt, synthetic construct
  misc_feature 1..20: note = HBV-targeting guide sequence portion
  source 1..20: mol_type = other RNA
cagccatgggaacgatgtat

SEQ ID NO: 1891 - RNA, 20 nt, synthetic construct
  misc_feature 1..20: note = HBV-targeting guide sequence portion
  source 1..20: mol_type = other RNA
cagcccgtttctcttggctc

SEQ ID NO: 1892 - RNA, 20 nt, synthetic construct
  misc_feature 1..20: note = HBV-targeting guide sequence portion
  source 1..20: mol_type = other RNA
cagccggtctggagcaaaca

SEQ ID NO: 1893 - RNA, 20 nt, synthetic construct
  misc_feature 1..20: note = HBV-targeting guide sequence portion
  source 1..20: mol_type = other RNA
cagcctaccccgctgtctcc

SEQ ID NO: 1894 - RNA, 20 nt, synthetic construct
  misc_feature 1..20: note = HBV-targeting guide sequence portion
  source 1..20: mol_type = other RNA
cagcctagcagccatgggaa

SEQ ID NO: 1895 - RNA, 20 nt, synthetic construct
  misc_feature 1..20: note = HBV-targeting guide sequence portion
  source 1..20: mol_type = other RNA
cagcctcctagtacaaagat

SEQ ID NO: 1896 - RNA, 20 nt, synthetic construct
  misc_feature 1..20: note = HBV-targeting guide sequence portion
  source 1..20: mol_type = other RNA
cagccttcagagcaaactcc

SEQ ID NO: 1897 - RNA, 20 nt, synthetic construct
  misc_feature 1..20: note = HBV-targeting guide sequence portion
  source 1..20: mol_type = other RNA
cagcgataaccaggacaagt

SEQ ID NO: 1898 - RNA, 20 nt, synthetic construct
  misc_feature 1..20: note = HBV-targeting guide sequence portion
  source 1..20: mol_type = other RNA
cagcgcagggtccccaatcc

SEQ ID NO: 1899 - RNA, 20 nt, synthetic construct
  misc_feature 1..20: note = HBV-targeting guide sequence portion
  source 1..20: mol_type = other RNA
cagcgcatgcgtggaacctt

SEQ ID NO: 1900 - RNA, 20 nt, synthetic construct
  misc_feature 1..20: note = HBV-targeting guide sequence portion
  source 1..20: mol_type = other RNA
cagcgccgacgggacgtaaa

SEQ ID NO: 1901 - RNA, 20 nt, synthetic construct
  misc_feature 1..20: note = HBV-targeting guide sequence portion
  source 1..20: mol_type = other RNA
cagcggggtaggctgccgtc

SEQ ID NO: 1902 - RNA, 20 nt, synthetic construct
  misc_feature 1..20: note = HBV-targeting guide sequence portion
  source 1..20: mol_type = other RNA
cagcggtataaagggactca

SEQ ID NO: 1903 - RNA, 20 nt, synthetic construct
  misc_feature 1..20: note = HBV-targeting guide sequence portion
  source 1..20: mol_type = other RNA
cagctcctaccttgttggcg

SEQ ID NO: 1904 - RNA, 20 nt, synthetic construct
  misc_feature 1..20: note = HBV-targeting guide sequence portion
  source 1..20: mol_type = other RNA
cagctctgtatcgggatgcc

SEQ ID NO: 1905 - RNA, 20 nt, synthetic construct
  misc_feature 1..20: note = HBV-targeting guide sequence portion
  source 1..20: mol_type = other RNA
cagcttatagaccaccaaat

SEQ ID NO: 1906 - RNA, 20 nt, synthetic construct
  misc_feature 1..20: note = HBV-targeting guide sequence portion
  source 1..20: mol_type = other RNA
cagcttggaggcttgaacag

SEQ ID NO: 1907 - RNA, 20 nt, synthetic construct
  misc_feature 1..20: note = HBV-targeting guide sequence portion
  source 1..20: mol_type = other RNA
caggaacagtaaaccctgtt

SEQ ID NO: 1908 - RNA, 20 nt, synthetic construct
  misc_feature 1..20: note = HBV-targeting guide sequence portion
  source 1..20: mol_type = other RNA
caggacaagttggaggacag

SEQ ID NO: 1909 - RNA, 20 nt, synthetic construct
  misc_feature 1..20: note = HBV-targeting guide sequence portion
  source 1..20: mol_type = other RNA
caggacggcagcctaccccg

SEQ ID NO: 1910 - RNA, 20 nt, synthetic construct
  misc_feature 1..20: note = HBV-targeting guide sequence portion
  source 1..20: mol_type = other RNA
caggagactccaaggcatcc

SEQ ID NO: 1911 - RNA, 20 nt, synthetic construct
  misc_feature 1..20: note = HBV-targeting guide sequence portion
  source 1..20: mol_type = other RNA
caggaggcggatttgctggc

SEQ ID NO: 1912 - RNA, 20 nt, synthetic construct
  misc_feature 1..20: note = HBV-targeting guide sequence portion
  source 1..20: mol_type = other RNA
caggagggatacatagaggt

SEQ ID NO: 1913 - RNA, 20 nt, synthetic construct
  misc_feature 1..20: note = HBV-targeting guide sequence portion
  source 1..20: mol_type = other RNA
caggaggttggtgagtgatt

SEQ ID NO: 1914 - RNA, 20 nt, synthetic construct
  misc_feature 1..20: note = HBV-targeting guide sequence portion
  source 1..20: mol_type = other RNA
caggagtcgtgcaggttctg

SEQ ID NO: 1915 - RNA, 20 nt, synthetic construct
  misc_feature 1..20: note = HBV-targeting guide sequence portion
  source 1..20: mol_type = other RNA
caggataaccacattgtgta

SEQ ID NO: 1916 - RNA, 20 nt, synthetic construct
  misc_feature 1..20: note = HBV-targeting guide sequence portion
  source 1..20: mol_type = other RNA
caggatcatcaaccaccagc

SEQ ID NO: 1917 - RNA, 20 nt, synthetic construct
  misc_feature 1..20: note = HBV-targeting guide sequence portion
  source 1..20: mol_type = other RNA
caggatccagttggcagcac

SEQ ID NO: 1918 - RNA, 20 nt, synthetic construct
  misc_feature 1..20: note = HBV-targeting guide sequence portion
  source 1..20: mol_type = other RNA
caggatgaagaggaagatga

SEQ ID NO: 1919 - RNA, 20 nt, synthetic construct
  misc_feature 1..20: note = HBV-targeting guide sequence portion
  source 1..20: mol_type = other RNA
caggatgatgggatgggaat

SEQ ID NO: 1920 - RNA, 20 nt, synthetic construct
  misc_feature 1..20: note = HBV-targeting guide sequence portion
  source 1..20: mol_type = other RNA
caggattcctaggacccctg

SEQ ID NO: 1921 - RNA, 20 nt, synthetic construct
  misc_feature 1..20: note = HBV-targeting guide sequence portion
  source 1..20: mol_type = other RNA
caggcaacggccaggtctgt

SEQ ID NO: 1922 - RNA, 20 nt, synthetic construct
  misc_feature 1..20: note = HBV-targeting guide sequence portion
  source 1..20: mol_type = other RNA
caggcaagcaattctttgct

SEQ ID NO: 1923 - RNA, 20 nt, synthetic construct
  misc_feature 1..20: note = HBV-targeting guide sequence portion
  source 1..20: mol_type = other RNA
caggcagagaagaggacgac

SEQ ID NO: 1924 - RNA, 20 nt, synthetic construct
  misc_feature 1..20: note = HBV-targeting guide sequence portion
  source 1..20: mol_type = other RNA
caggcataatcaatttcaac

SEQ ID NO: 1925 - RNA, 20 nt, synthetic construct
  misc_feature 1..20: note = HBV-targeting guide sequence portion
  source 1..20: mol_type = other RNA
caggcctattgattggaaag

SEQ ID NO: 1926 - RNA, 20 nt, synthetic construct
  misc_feature 1..20: note = HBV-targeting guide sequence portion
  source 1..20: mol_type = other RNA
caggcctctcactctgggat

SEQ ID NO: 1927 - RNA, 20 nt, synthetic construct
  misc_feature 1..20: note = HBV-targeting guide sequence portion
  source 1..20: mol_type = other RNA
caggcggggttttccttgtt

SEQ ID NO: 1928 - RNA, 20 nt, synthetic construct
  misc_feature 1..20: note = HBV-targeting guide sequence portion
  source 1..20: mol_type = other RNA
caggctcagggcataatgca

SEQ ID NO: 1929 - RNA, 20 nt, synthetic construct
  misc_feature 1..20: note = HBV-targeting guide sequence portion
  source 1..20: mol_type = other RNA
caggctttcactttttcgcc

SEQ ID NO: 1930 - RNA, 20 nt, synthetic construct
  misc_feature 1..20: note = HBV-targeting guide sequence portion
  source 1..20: mol_type = other RNA
cagggagatacaggcctctc

SEQ ID NO: 1931 - RNA, 20 nt, synthetic construct
  misc_feature 1..20: note = HBV-targeting guide sequence portion
  source 1..20: mol_type = other RNA
cagggatccttgttgggatt

SEQ ID NO: 1932 - RNA, 20 nt, synthetic construct
  misc_feature 1..20: note = HBV-targeting guide sequence portion
  source 1..20: mol_type = other RNA
cagggcataatgcaaacctt

SEQ ID NO: 1933 - RNA, 20 nt, synthetic construct
  misc_feature 1..20: note = HBV-targeting guide sequence portion
  source 1..20: mol_type = other RNA
cagggccccaagcggcctcg

SEQ ID NO: 1934 - RNA, 20 nt, synthetic construct
  misc_feature 1..20: note = HBV-targeting guide sequence portion
  source 1..20: mol_type = other RNA
caggggtcctaggaatcctg

SEQ ID NO: 1935 - RNA, 20 nt, synthetic construct
  misc_feature 1..20: note = HBV-targeting guide sequence portion
  source 1..20: mol_type = other RNA
cagggtccccaatcctcgag

SEQ ID NO: 1936 - RNA, 20 nt, synthetic construct
  misc_feature 1..20: note = HBV-targeting guide sequence portion
  source 1..20: mol_type = other RNA
cagggtcccgtgctggtggt

SEQ ID NO: 1937 - RNA, 20 nt, synthetic construct
  misc_feature 1..20: note = HBV-targeting guide sequence portion
  source 1..20: mol_type = other RNA
cagggtttactgttcctgaa

SEQ ID NO: 1938 - RNA, 20 nt, synthetic construct
  misc_feature 1..20: note = HBV-targeting guide sequence portion
  source 1..20: mol_type = other RNA
caggtacagtagaagaataa

SEQ ID NO: 1939 - RNA, 20 nt, synthetic construct
  misc_feature 1..20: note = HBV-targeting guide sequence portion
  source 1..20: mol_type = other RNA
caggtagctagagtcattag

SEQ ID NO: 1940 - RNA, 20 nt, synthetic construct
  misc_feature 1..20: note = HBV-targeting guide sequence portion
  source 1..20: mol_type = other RNA
caggtattgtttacacagaa

SEQ ID NO: 1941 - RNA, 20 nt, synthetic construct
  misc_feature 1..20: note = HBV-targeting guide sequence portion
  source 1..20: mol_type = other RNA
caggtcccctagaagaagaa

SEQ ID NO: 1942 - RNA, 20 nt, synthetic construct
  misc_feature 1..20: note = HBV-targeting guide sequence portion
  source 1..20: mol_type = other RNA
caggtctgtgccaagtgttt

SEQ ID NO: 1943 - RNA, 20 nt, synthetic construct
  misc_feature 1..20: note = HBV-targeting guide sequence portion
  source 1..20: mol_type = other RNA
caggtgcagtttccatccga

SEQ ID NO: 1944 - RNA, 20 nt, synthetic construct
  misc_feature 1..20: note = HBV-targeting guide sequence portion
  source 1..20: mol_type = other RNA
caggttctgcagggtcccgt

SEQ ID NO: 1945 - RNA, 20 nt, synthetic construct
  misc_feature 1..20: note = HBV-targeting guide sequence portion
  source 1..20: mol_type = other RNA
cagtaaaccctgttccgact

SEQ ID NO: 1946 - RNA, 20 nt, synthetic construct
  misc_feature 1..20: note = HBV-targeting guide sequence portion
  source 1..20: mol_type = other RNA
cagtagaagaataaagcccc

SEQ ID NO: 1947 - RNA, 20 nt, synthetic construct
  misc_feature 1..20: note = HBV-targeting guide sequence portion
  source 1..20: mol_type = other RNA
cagtagctccaaattcttta

SEQ ID NO: 1948 - RNA, 20 nt, synthetic construct
  misc_feature 1..20: note = HBV-targeting guide sequence portion
  source 1..20: mol_type = other RNA
cagtaggacatgaacaagag

SEQ ID NO: 1949 - RNA, 20 nt, synthetic construct
  misc_feature 1..20: note = HBV-targeting guide sequence portion
  source 1..20: mol_type = other RNA
cagtagtcggaacagggttt

SEQ ID NO: 1950 - RNA, 20 nt, synthetic construct
  misc_feature 1..20: note = HBV-targeting guide sequence portion
  source 1..20: mol_type = other RNA
cagtatggatcggcagagga

SEQ ID NO: 1951 - RNA, 20 nt, synthetic construct
  misc_feature 1..20: note = HBV-targeting guide sequence portion
  source 1..20: mol_type = other RNA
cagtatggtgaggtgaacaa

SEQ ID NO: 1952 - RNA, 20 nt, synthetic construct
  misc_feature 1..20: note = HBV-targeting guide sequence portion
  source 1..20: mol_type = other RNA
cagtcaggacggcagcctac

SEQ ID NO: 1953 - RNA, 20 nt, synthetic construct
  misc_feature 1..20: note = HBV-targeting guide sequence portion
  source 1..20: mol_type = other RNA
cagtccccaacctccaatca

SEQ ID NO: 1954 - RNA, 20 nt, synthetic construct
  misc_feature 1..20: note = HBV-targeting guide sequence portion
  source 1..20: mol_type = other RNA
cagtcccgagaatgtttgct

SEQ ID NO: 1955 - RNA, 20 nt, synthetic construct
  misc_feature 1..20: note = HBV-targeting guide sequence portion
  source 1..20: mol_type = other RNA
cagtctttaaacaaacagtc

SEQ ID NO: 1956 - RNA, 20 nt, synthetic construct
  misc_feature 1..20: note = HBV-targeting guide sequence portion
  source 1..20: mol_type = other RNA
cagtctttgaagtatgcctc

SEQ ID NO: 1957 - RNA, 20 nt, synthetic construct
  misc_feature 1..20: note = HBV-targeting guide sequence portion
  source 1..20: mol_type = other RNA
cagtgggggaaagccctacg

SEQ ID NO: 1958 - RNA, 20 nt, synthetic construct
  misc_feature 1..20: note = HBV-targeting guide sequence portion
  source 1..20: mol_type = other RNA
cagtgggggttgcatcagca

SEQ ID NO: 1959 - RNA, 20 nt, synthetic construct
  misc_feature 1..20: note = HBV-targeting guide sequence portion
  source 1..20: mol_type = other RNA
cagtggttcgtagggctttc

SEQ ID NO: 1960 - RNA, 20 nt, synthetic construct
  misc_feature 1..20: note = HBV-targeting guide sequence portion
  source 1..20: mol_type = other RNA
cagttaatgagaaaagacgg

SEQ ID NO: 1961 - RNA, 20 nt, synthetic construct
  misc_feature 1..20: note = HBV-targeting guide sequence portion
  source 1..20: mol_type = other RNA
cagttatatggatgatgtgg

SEQ ID NO: 1962 - RNA, 20 nt, synthetic construct
  misc_feature 1..20: note = HBV-targeting guide sequence portion
  source 1..20: mol_type = other RNA
cagttatgtcaacactcata

SEQ ID NO: 1963 - RNA, 20 nt, synthetic construct
  misc_feature 1..20: note = HBV-targeting guide sequence portion
  source 1..20: mol_type = other RNA
cagttcaggaacagtaaacc

SEQ ID NO: 1964 - RNA, 20 nt, synthetic construct
  misc_feature 1..20: note = HBV-targeting guide sequence portion
  source 1..20: mol_type = other RNA
cagttggacccagccttcag

SEQ ID NO: 1965 - RNA, 20 nt, synthetic construct
  misc_feature 1..20: note = HBV-targeting guide sequence portion
  source 1..20: mol_type = other RNA
cagttggcagcacagcctag

SEQ ID NO: 1966 - RNA, 20 nt, synthetic construct
  misc_feature 1..20: note = HBV-targeting guide sequence portion
  source 1..20: mol_type = other RNA
cagtttactagtgccatttg

SEQ ID NO: 1967 - RNA, 20 nt, synthetic construct
  misc_feature 1..20: note = HBV-targeting guide sequence portion
  source 1..20: mol_type = other RNA
cagtttccatccgaaggttt

SEQ ID NO: 1968 - RNA, 20 nt, synthetic construct
  misc_feature 1..20: note = HBV-targeting guide sequence portion
  source 1..20: mol_type = other RNA
cagtttgtaggcccgcttac

SEQ ID NO: 1969 - RNA, 20 nt, synthetic construct
  misc_feature 1..20: note = HBV-targeting guide sequence portion
  source 1..20: mol_type = other RNA
cataaattggtctgcgcacc

SEQ ID NO: 1970 - RNA, 20 nt, synthetic construct
  misc_feature 1..20: note = HBV-targeting guide sequence portion
  source 1..20: mol_type = other RNA
cataactgactactaggtcc

SEQ ID NO: 1971 - RNA, 20 nt, synthetic construct
  misc_feature 1..20: note = HBV-targeting guide sequence portion
  source 1..20: mol_type = other RNA
cataagaggactcttggact

SEQ ID NO: 1972 - RNA, 20 nt, synthetic construct
  misc_feature 1..20: note = HBV-targeting guide sequence portion
  source 1..20: mol_type = other RNA
cataaggtgggaaattttac

SEQ ID NO: 1973 - RNA, 20 nt, synthetic construct
  misc_feature 1..20: note = HBV-targeting guide sequence portion
  source 1..20: mol_type = other RNA
cataatcaatttcaaccgtc

SEQ ID NO: 1974 - RNA, 20 nt, synthetic construct
  misc_feature 1..20: note = HBV-targeting guide sequence portion
  source 1..20: mol_type = other RNA
cataatgcaaaccttgccag

SEQ ID NO: 1975 - RNA, 20 nt, synthetic construct
  misc_feature 1..20: note = HBV-targeting guide sequence portion
  source 1..20: mol_type = other RNA
catacaagggcattaaagca

SEQ ID NO: 1976 - RNA, 20 nt, synthetic construct
  misc_feature 1..20: note = HBV-targeting guide sequence portion
  source 1..20: mol_type = other RNA
catacacaaaatcaaagaat

SEQ ID NO: 1977 - RNA, 20 nt, synthetic construct
  misc_feature 1..20: note = HBV-targeting guide sequence portion
  source 1..20: mol_type = other RNA
cataccttgatagtccagaa

SEQ ID NO: 1978 - RNA, 20 nt, synthetic construct
  misc_feature 1..20: note = HBV-targeting guide sequence portion
  source 1..20: mol_type = other RNA
catactgcactcaggcaagc

SEQ ID NO: 1979 - RNA, 20 nt, synthetic construct
  misc_feature 1..20: note = HBV-targeting guide sequence portion
  source 1..20: mol_type = other RNA
catactgcggaactcctagc

SEQ ID NO: 1980 - RNA, 20 nt, synthetic construct
  misc_feature 1..20: note = HBV-targeting guide sequence portion
  source 1..20: mol_type = other RNA
catacttcaaagactgtttg

SEQ ID NO: 1981 - RNA, 20 nt, synthetic construct
  misc_feature 1..20: note = HBV-targeting guide sequence portion
  source 1..20: mol_type = other RNA
catagaggttccttgagcag

SEQ ID NO: 1982 - RNA, 20 nt, synthetic construct
  misc_feature 1..20: note = HBV-targeting guide sequence portion
  source 1..20: mol_type = other RNA
catagagtgtgtaaatagtg

SEQ ID NO: 1983 - RNA, 20 nt, synthetic construct
  misc_feature 1..20: note = HBV-targeting guide sequence portion
  source 1..20: mol_type = other RNA
catagcagcaggatgaagag

SEQ ID NO: 1984 - RNA, 20 nt, synthetic construct
  misc_feature 1..20: note = HBV-targeting guide sequence portion
  source 1..20: mol_type = other RNA
catagcccatgaaattaaga

SEQ ID NO: 1985 - RNA, 20 nt, synthetic construct
  misc_feature 1..20: note = HBV-targeting guide sequence portion
  source 1..20: mol_type = other RNA
catagcgcctcattctgtgg

SEQ ID NO: 1986 - RNA, 20 nt, synthetic construct
  misc_feature 1..20: note = HBV-targeting guide sequence portion
  source 1..20: mol_type = other RNA
cataggaattttccgaaagc

SEQ ID NO: 1987 - RNA, 20 nt, synthetic construct
  misc_feature 1..20: note = HBV-targeting guide sequence portion
  source 1..20: mol_type = other RNA
cataggccatcagcgcatgc

SEQ ID NO: 1988 - RNA, 20 nt, synthetic construct
  misc_feature 1..20: note = HBV-targeting guide sequence portion
  source 1..20: mol_type = other RNA
catataaagaatttggagct

SEQ ID NO: 1989 - RNA, 20 nt, synthetic construct
  misc_feature 1..20: note = HBV-targeting guide sequence portion
  source 1..20: mol_type = other RNA
catataactgaaagccaaac

SEQ ID NO: 1990 - RNA, 20 nt, synthetic construct
  misc_feature 1..20: note = HBV-targeting guide sequence portion
  source 1..20: mol_type = other RNA
catatcgtcaatcttctcga

SEQ ID NO: 1991 - RNA, 20 nt, synthetic construct
  misc_feature 1..20: note = HBV-targeting guide sequence portion
  source 1..20: mol_type = other RNA
catatgagtgttgacataac

SEQ ID NO: 1992 - RNA, 20 nt, synthetic construct
  misc_feature 1..20: note = HBV-targeting guide sequence portion
  source 1..20: mol_type = other RNA
catatgggcctaaagttcag

SEQ ID NO: 1993 - RNA, 20 nt, synthetic construct
  misc_feature 1..20: note = HBV-targeting guide sequence portion
  source 1..20: mol_type = other RNA
catattcttgggaacaagag

SEQ ID NO: 1994 - RNA, 20 nt, synthetic construct
  misc_feature 1..20: note = HBV-targeting guide sequence portion
  source 1..20: mol_type = other RNA
catcaaccaccagcacggga

SEQ ID NO: 1995 - RNA, 20 nt, synthetic construct
  misc_feature 1..20: note = HBV-targeting guide sequence portion
  source 1..20: mol_type = other RNA
catcacatcaggattcctag

SEQ ID NO: 1996 - RNA, 20 nt, synthetic construct
  misc_feature 1..20: note = HBV-targeting guide sequence portion
  source 1..20: mol_type = other RNA
catcagcaaacacttggcac

SEQ ID NO: 1997 - RNA, 20 nt, synthetic construct
  misc_feature 1..20: note = HBV-targeting guide sequence portion
  source 1..20: mol_type = other RNA
catcagcgcatgcgtggaac

SEQ ID NO: 1998 - RNA, 20 nt, synthetic construct
  misc_feature 1..20: note = HBV-targeting guide sequence portion
  source 1..20: mol_type = other RNA
catcaggattcctaggaccc

SEQ ID NO: 1999 - RNA, 20 nt, synthetic construct
  misc_feature 1..20: note = HBV-targeting guide sequence portion
  source 1..20: mol_type = other RNA
catcatacacaaaatcaaag

SEQ ID NO: 2000 - RNA, 20 nt, synthetic construct
  misc_feature 1..20: note = HBV-targeting guide sequence portion
  source 1..20: mol_type = other RNA
catcatccatataactgaaa

SEQ ID NO: 2001 - RNA, 20 nt, synthetic construct
  misc_feature 1..20: note = HBV-targeting guide sequence portion
  source 1..20: mol_type = other RNA
catcatcctgggctttcgga

SEQ ID NO: 2002 - RNA, 20 nt, synthetic construct
  misc_feature 1..20: note = HBV-targeting guide sequence portion
  source 1..20: mol_type = other RNA
catccagcgataaccaggac

SEQ ID NO: 2003 - RNA, 20 nt, synthetic construct
  misc_feature 1..20: note = HBV-targeting guide sequence portion
  source 1..20: mol_type = other RNA
catccatataactgaaagcc

SEQ ID NO: 2004 - RNA, 20 nt, synthetic construct
  misc_feature 1..20: note = HBV-targeting guide sequence portion
  source 1..20: mol_type = other RNA
catcccatcatcctgggctt

SEQ ID NO: 2005 - RNA, 20 nt, synthetic construct
  misc_feature 1..20: note = HBV-targeting guide sequence portion
  source 1..20: mol_type = other RNA
catcccgatacagagctgcg

SEQ ID NO: 2006 - RNA, 20 nt, synthetic construct
  misc_feature 1..20: note = HBV-targeting guide sequence portion
  source 1..20: mol_type = other RNA
catccgaaggttttgtacag

SEQ ID NO: 2007 - RNA, 20 nt, synthetic construct
  misc_feature 1..20: note = HBV-targeting guide sequence portion
  source 1..20: mol_type = other RNA
catcctgctgctatgcctca

SEQ ID NO: 2008 - RNA, 20 nt, synthetic construct
  misc_feature 1..20: note = HBV-targeting guide sequence portion
  source 1..20: mol_type = other RNA
catcctgggctttcggaaaa

SEQ ID NO: 2009 - RNA, 20 nt, synthetic construct
  misc_feature 1..20: note = HBV-targeting guide sequence portion
  source 1..20: mol_type = other RNA
catcgttcccatggctgcta

SEQ ID NO: 2010 - RNA, 20 nt, synthetic construct
  misc_feature 1..20: note = HBV-targeting guide sequence portion
  source 1..20: mol_type = other RNA
catctacaccaagatattat

SEQ ID NO: 2011 - RNA, 20 nt, synthetic construct
  misc_feature 1..20: note = HBV-targeting guide sequence portion
  source 1..20: mol_type = other RNA
catctagggacctagtagtc

SEQ ID NO: 2012 - RNA, 20 nt, synthetic construct
  misc_feature 1..20: note = HBV-targeting guide sequence portion
  source 1..20: mol_type = other RNA
catctagttaatcattactt

SEQ ID NO: 2013 - RNA, 20 nt, synthetic construct
  misc_feature 1..20: note = HBV-targeting guide sequence portion
  source 1..20: mol_type = other RNA
catctcgaggccgcttgggg

SEQ ID NO: 2014 - RNA, 20 nt, synthetic construct
  misc_feature 1..20: note = HBV-targeting guide sequence portion
  source 1..20: mol_type = other RNA
catctcttgttcatgtccta

SEQ ID NO: 2015 - RNA, 20 nt, synthetic construct
  misc_feature 1..20: note = HBV-targeting guide sequence portion
  source 1..20: mol_type = other RNA
catctctttgttttgttagg

SEQ ID NO: 2016 - RNA, 20 nt, synthetic construct
  misc_feature 1..20: note = HBV-targeting guide sequence portion
  source 1..20: mol_type = other RNA
catctgccggaccgtgtgca

SEQ ID NO: 2017 - RNA, 20 nt, synthetic construct
  misc_feature 1..20: note = HBV-targeting guide sequence portion
  source 1..20: mol_type = other RNA
catcttcctcttcatcctgc

SEQ ID NO: 2018 - RNA, 20 nt, synthetic construct
  misc_feature 1..20: note = HBV-targeting guide sequence portion
  source 1..20: mol_type = other RNA
catcttcttgttggttcttc

SEQ ID NO: 2019 - RNA, 20 nt, synthetic construct
  misc_feature 1..20: note = HBV-targeting guide sequence portion
  source 1..20: mol_type = other RNA
catcttgagtccctttatac

SEQ ID NO: 2020 - RNA, 20 nt, synthetic construct
  misc_feature 1..20: note = HBV-targeting guide sequence portion
  source 1..20: mol_type = other RNA
catgaaattaagagaataac

SEQ ID NO: 2021 - RNA, 20 nt, synthetic construct
  misc_feature 1..20: note = HBV-targeting guide sequence portion
  source 1..20: mol_type = other RNA
catgaacaagagatgattag

SEQ ID NO: 2022 - RNA, 20 nt, synthetic construct
  misc_feature 1..20: note = HBV-targeting guide sequence portion
  source 1..20: mol_type = other RNA
catgcaactttttcacctct

SEQ ID NO: 2023 - RNA, 20 nt, synthetic construct
  misc_feature 1..20: note = HBV-targeting guide sequence portion
  source 1..20: mol_type = other RNA
catgcatacaagggcattaa

SEQ ID NO: 2024 - RNA, 20 nt, synthetic construct
  misc_feature 1..20: note = HBV-targeting guide sequence portion
  source 1..20: mol_type = other RNA
catgccctaaagccacccaa

SEQ ID NO: 2025 - RNA, 20 nt, synthetic construct
  misc_feature 1..20: note = HBV-targeting guide sequence portion
  source 1..20: mol_type = other RNA
catgcgacgtgcagaggtga

SEQ ID NO: 2026 - RNA, 20 nt, synthetic construct
  misc_feature 1..20: note = HBV-targeting guide sequence portion
  source 1..20: mol_type = other RNA
catgcgctgatggcctatga

SEQ ID NO: 2027 - RNA, 20 nt, synthetic construct
  misc_feature 1..20: note = HBV-targeting guide sequence portion
  source 1..20: mol_type = other RNA
catgcgtggaacctttccgg

SEQ ID NO: 2028 - RNA, 20 nt, synthetic construct
  misc_feature 1..20: note = HBV-targeting guide sequence portion
  source 1..20: mol_type = other RNA
catgctgtagctcttgttcc

SEQ ID NO: 2029 - RNA, 20 nt, synthetic construct
  misc_feature 1..20: note = HBV-targeting guide sequence portion
  source 1..20: mol_type = other RNA
catggacattgacccatata

SEQ ID NO: 2030 - RNA, 20 nt, synthetic construct
  misc_feature 1..20: note = HBV-targeting guide sequence portion
  source 1..20: mol_type = other RNA
catggagaacatcacatcag

SEQ ID NO: 2031 - RNA, 20 nt, synthetic construct
  misc_feature 1..20: note = HBV-targeting guide sequence portion
  source 1..20: mol_type = other RNA
catggagaccaccgtgaacg

SEQ ID NO: 2032 - RNA, 20 nt, synthetic construct
  misc_feature 1..20: note = HBV-targeting guide sequence portion
  source 1..20: mol_type = other RNA
catggcctgaggatgagtgt

SEQ ID NO: 2033 - RNA, 20 nt, synthetic construct
  misc_feature 1..20: note = HBV-targeting guide sequence portion
  source 1..20: mol_type = other RNA
catggctgctaggctgtgct

SEQ ID NO: 2034 - RNA, 20 nt, synthetic construct
  misc_feature 1..20: note = HBV-targeting guide sequence portion
  source 1..20: mol_type = other RNA
catgggaacgatgtatattt

SEQ ID NO: 2035 - RNA, 20 nt, synthetic construct
  misc_feature 1..20: note = HBV-targeting guide sequence portion
  source 1..20: mol_type = other RNA
catgggctatgtcattgatt

SEQ ID NO: 2036 - RNA, 20 nt, synthetic construct
  misc_feature 1..20: note = HBV-targeting guide sequence portion
  source 1..20: mol_type = other RNA
catggggcagaatctttcca

SEQ ID NO: 2037 - RNA, 20 nt, synthetic construct
  misc_feature 1..20: note = HBV-targeting guide sequence portion
  source 1..20: mol_type = other RNA
catggtgctggtgcgcagac

SEQ ID NO: 2038 - RNA, 20 nt, synthetic construct
  misc_feature 1..20: note = HBV-targeting guide sequence portion
  source 1..20: mol_type = other RNA
catgtattcaatctaagcag

SEQ ID NO: 2039 - RNA, 20 nt, synthetic construct
  misc_feature 1..20: note = HBV-targeting guide sequence portion
  source 1..20: mol_type = other RNA
catgtcctactgttcaagcc

SEQ ID NO: 2040 - RNA, 20 nt, synthetic construct
  misc_feature 1..20: note = HBV-targeting guide sequence portion
  source 1..20: mol_type = other RNA
catgttcagcgcagggtccc

SEQ ID NO: 2041 - RNA, 20 nt, synthetic construct
  misc_feature 1..20: note = HBV-targeting guide sequence portion
  source 1..20: mol_type = other RNA
cattaaagcaggataaccac

SEQ ID NO: 2042 - RNA, 20 nt, synthetic construct
  misc_feature 1..20: note = HBV-targeting guide sequence portion
  source 1..20: mol_type = other RNA
cattaactgtaagcgggcct

SEQ ID NO: 2043 - RNA, 20 nt, synthetic construct
  misc_feature 1..20: note = HBV-targeting guide sequence portion
  source 1..20: mol_type = other RNA
cattaatctaatctcctccc

SEQ ID NO: 2044 - RNA, 20 nt, synthetic construct
  misc_feature 1..20: note = HBV-targeting guide sequence portion
  source 1..20: mol_type = other RNA
cattacttccaaactagaca

SEQ ID NO: 2045 - RNA, 20 nt, synthetic construct
  misc_feature 1..20: note = HBV-targeting guide sequence portion
  source 1..20: mol_type = other RNA
cattagttctccccagcaaa

SEQ ID NO: 2046 - RNA, 20 nt, synthetic construct
  misc_feature 1..20: note = HBV-targeting guide sequence portion
  source 1..20: mol_type = other RNA
cattatgccctgagcctgag

SEQ ID NO: 2047 - RNA, 20 nt, synthetic construct
  misc_feature 1..20: note = HBV-targeting guide sequence portion
  source 1..20: mol_type = other RNA
cattcgggctagggttcacc

SEQ ID NO: 2048 - RNA, 20 nt, synthetic construct
  misc_feature 1..20: note = HBV-targeting guide sequence portion
  source 1..20: mol_type = other RNA
cattctcgggactgacaact

SEQ ID NO: 2049 - RNA, 20 nt, synthetic construct
  misc_feature 1..20: note = HBV-targeting guide sequence portion
  source 1..20: mol_type = other RNA
cattctgtgggtcaccatat

SEQ ID NO: 2050 - RNA, 20 nt, synthetic construct
  misc_feature 1..20: note = HBV-targeting guide sequence portion
  source 1..20: mol_type = other RNA
cattctttgattttgtgtat

SEQ ID NO: 2051 - RNA, 20 nt, synthetic construct
  misc_feature 1..20: note = HBV-targeting guide sequence portion
  source 1..20: mol_type = other RNA
cattgacccatataaagaat

SEQ ID NO: 2052 - RNA, 20 nt, synthetic construct
  misc_feature 1..20: note = HBV-targeting guide sequence portion
  source 1..20: mol_type = other RNA
cattgagatccccgagattg

SEQ ID NO: 2053 - RNA, 20 nt, synthetic construct
  misc_feature 1..20: note = HBV-targeting guide sequence portion
  source 1..20: mol_type = other RNA
cattgattgttggggatcat

SEQ ID NO: 2054 - RNA, 20 nt, synthetic construct
  misc_feature 1..20: note = HBV-targeting guide sequence portion
  source 1..20: mol_type = other RNA
cattgcagagagtccaagag

SEQ ID NO: 2055 - RNA, 20 nt, synthetic construct
  misc_feature 1..20: note = HBV-targeting guide sequence portion
  source 1..20: mol_type = other RNA
cattgccacaaaatcacatc

SEQ ID NO: 2056 - RNA, 20 nt, synthetic construct
  misc_feature 1..20: note = HBV-targeting guide sequence portion
  source 1..20: mol_type = other RNA
cattggaaaacaccctcttt

SEQ ID NO: 2057 - RNA, 20 nt, synthetic construct
  misc_feature 1..20: note = HBV-targeting guide sequence portion
  source 1..20: mol_type = other RNA
cattgtgtaaaaggggcagc

SEQ ID NO: 2058 - RNA, 20 nt, synthetic construct
  misc_feature 1..20: note = HBV-targeting guide sequence portion
  source 1..20: mol_type = other RNA
cattgttcacctcaccatac

SEQ ID NO: 2059 - RNA, 20 nt, synthetic construct
  misc_feature 1..20: note = HBV-targeting guide sequence portion
  source 1..20: mol_type = other RNA
catttaaaccctaacaaaac

SEQ ID NO: 2060 - RNA, 20 nt, synthetic construct
  misc_feature 1..20: note = HBV-targeting guide sequence portion
  source 1..20: mol_type = other RNA
catttcttgtcttacttttg

SEQ ID NO: 2061 - RNA, 20 nt, synthetic construct
  misc_feature 1..20: note = HBV-targeting guide sequence portion
  source 1..20: mol_type = other RNA
catttggtggtctataagct

SEQ ID NO: 2062 - RNA, 20 nt, synthetic construct
  misc_feature 1..20: note = HBV-targeting guide sequence portion
  source 1..20: mol_type = other RNA
catttgttcagtggttcgta

SEQ ID NO: 2063 - RNA, 20 nt, synthetic construct
  misc_feature 1..20: note = HBV-targeting guide sequence portion
  source 1..20: mol_type = other RNA
cattttttgataatatcttg

SEQ ID NO: 2064 - RNA, 20 nt, synthetic construct
  misc_feature 1..20: note = HBV-targeting guide sequence portion
  source 1..20: mol_type = other RNA
ccaaaagacaccaaatactc

SEQ ID NO: 2065 - RNA, 20 nt, synthetic construct
  misc_feature 1..20: note = HBV-targeting guide sequence portion
  source 1..20: mol_type = other RNA
ccaaaaggcctccgtgcggt

SEQ ID NO: 2066 - RNA, 20 nt, synthetic construct
  misc_feature 1..20: note = HBV-targeting guide sequence portion
  source 1..20: mol_type = other RNA
ccaaaagtaagacaagaaat

SEQ ID NO: 2067 - RNA, 20 nt, synthetic construct
  misc_feature 1..20: note = HBV-targeting guide sequence portion
  source 1..20: mol_type = other RNA
ccaaaattcgcagtccccaa

SEQ ID NO: 2068 - RNA, 20 nt, synthetic construct
  misc_feature 1..20: note = HBV-targeting guide sequence portion
  source 1..20: mol_type = other RNA
ccaaacagtgggggaaagcc

SEQ ID NO: 2069 - RNA, 20 nt, synthetic construct
  misc_feature 1..20: note = HBV-targeting guide sequence portion
  source 1..20: mol_type = other RNA
ccaaactagacactatttac

SEQ ID NO: 2070 - RNA, 20 nt, synthetic construct
  misc_feature 1..20: note = HBV-targeting guide sequence portion
  source 1..20: mol_type = other RNA
ccaaactctgcaagatccca

SEQ ID NO: 2071 - RNA, 20 nt, synthetic construct
  misc_feature 1..20: note = HBV-targeting guide sequence portion
  source 1..20: mol_type = other RNA
ccaaagacaaaagaaaattg

SEQ ID NO: 2072 - RNA, 20 nt, synthetic construct
  misc_feature 1..20: note = HBV-targeting guide sequence portion
  source 1..20: mol_type = other RNA
ccaaatactctaggaccgtt

SEQ ID NO: 2073 - RNA, 20 nt, synthetic construct
  misc_feature 1..20: note = HBV-targeting guide sequence portion
  source 1..20: mol_type = other RNA
ccaaatacttgcccttggat

SEQ ID NO: 2074 - RNA, 20 nt, synthetic construct
  misc_feature 1..20: note = HBV-targeting guide sequence portion
  source 1..20: mol_type = other RNA
ccaaatgcccctatcctatc

SEQ ID NO: 2075 - RNA, 20 nt, synthetic construct
  misc_feature 1..20: note = HBV-targeting guide sequence portion
  source 1..20: mol_type = other RNA
ccaaattctttatatgggtc

SEQ ID NO: 2076 - RNA, 20 nt, synthetic construct
  misc_feature 1..20: note = HBV-targeting guide sequence portion
  source 1..20: mol_type = other RNA
ccaacaagaagatgaggcat

SEQ ID NO: 2077 - RNA, 20 nt, synthetic construct
  misc_feature 1..20: note = HBV-targeting guide sequence portion
  source 1..20: mol_type = other RNA
ccaacaaggatccctggcca

SEQ ID NO: 2078 - RNA, 20 nt, synthetic construct
  misc_feature 1..20: note = HBV-targeting guide sequence portion
  source 1..20: mol_type = other RNA
ccaacaaggtaggagctgga

SEQ ID NO: 2079 - RNA, 20 nt, synthetic construct
  misc_feature 1..20: note = HBV-targeting guide sequence portion
  source 1..20: mol_type = other RNA
ccaacaatcaatgacatagc

SEQ ID NO: 2080 - RNA, 20 nt, synthetic construct
  misc_feature 1..20: note = HBV-targeting guide sequence portion
  source 1..20: mol_type = other RNA
ccaacaatccagattgggac

SEQ ID NO: 2081 - RNA, 20 nt, synthetic construct
  misc_feature 1..20: note = HBV-targeting guide sequence portion
  source 1..20: mol_type = other RNA
ccaaccagtgggggttgcat

SEQ ID NO: 2082 - RNA, 20 nt, synthetic construct
  misc_feature 1..20: note = HBV-targeting guide sequence portion
  source 1..20: mol_type = other RNA
ccaacctccaatcactcacc

SEQ ID NO: 2083 - RNA, 20 nt, synthetic construct
  misc_feature 1..20: note = HBV-targeting guide sequence portion
  source 1..20: mol_type = other RNA
ccaacctcctgtcctccaac

SEQ ID NO: 2084 - RNA, 20 nt, synthetic construct
  misc_feature 1..20: note = HBV-targeting guide sequence portion
  source 1..20: mol_type = other RNA
ccaactcctcccagtcttta

SEQ ID NO: 2085 - RNA, 20 nt, synthetic construct
  misc_feature 1..20: note = HBV-targeting guide sequence portion
  source 1..20: mol_type = other RNA
ccaactggatcctgcgcggg

SEQ ID NO: 2086 - RNA, 20 nt, synthetic construct
  misc_feature 1..20: note = HBV-targeting guide sequence portion
  source 1..20: mol_type = other RNA
ccaactggtggtcgggaaag

SEQ ID NO: 2087 - RNA, 20 nt, synthetic construct
  misc_feature 1..20: note = HBV-targeting guide sequence portion
  source 1..20: mol_type = other RNA
ccaacttacaaggcctttct

SEQ ID NO: 2088 - RNA, 20 nt, synthetic construct
  misc_feature 1..20: note = HBV-targeting guide sequence portion
  source 1..20: mol_type = other RNA
ccaacttgtcctggttatcg

SEQ ID NO: 2089 - RNA, 20 nt, synthetic construct
  misc_feature 1..20: note = HBV-targeting guide sequence portion
  source 1..20: mol_type = other RNA
ccaagaatatggtgacccac

SEQ ID NO: 2090 - RNA, 20 nt, synthetic construct
  misc_feature 1..20: note = HBV-targeting guide sequence portion
  source 1..20: mol_type = other RNA
ccaagacacacggtagttcc

SEQ ID NO: 2091 - RNA, 20 nt, synthetic construct
  misc_feature 1..20: note = HBV-targeting guide sequence portion
  source 1..20: mol_type = other RNA
ccaagagaaacgggctgagg

SEQ ID NO: 2092 - RNA, 20 nt, synthetic construct
  misc_feature 1..20: note = HBV-targeting guide sequence portion
  source 1..20: mol_type = other RNA
ccaagagtcctcttatgtaa

SEQ ID NO: 2093 - RNA, 20 nt, synthetic construct
  misc_feature 1..20: note = HBV-targeting guide sequence portion
  source 1..20: mol_type = other RNA
ccaagatattatcaaaaaat

SEQ ID NO: 2094 - RNA, 20 nt, synthetic construct
  misc_feature 1..20: note = HBV-targeting guide sequence portion
  source 1..20: mol_type = other RNA
ccaagccccaaccagtgggg

SEQ ID NO: 2095 - RNA, 20 nt, synthetic construct
  misc_feature 1..20: note = HBV-targeting guide sequence portion
  source 1..20: mol_type = other RNA
ccaagcggcctcgagatggg

SEQ ID NO: 2096 - RNA, 20 nt, synthetic construct
  misc_feature 1..20: note = HBV-targeting guide sequence portion
  source 1..20: mol_type = other RNA
ccaagctgtgccttgggtgg

SEQ ID NO: 2097 - RNA, 20 nt, synthetic construct
  misc_feature 1..20: note = HBV-targeting guide sequence portion
  source 1..20: mol_type = other RNA
ccaaggcacagcttggaggc

SEQ ID NO: 2098 - RNA, 20 nt, synthetic construct
  misc_feature 1..20: note = HBV-targeting guide sequence portion
  source 1..20: mol_type = other RNA
ccaaggcatcccgatacaga

SEQ ID NO: 2099 - RNA, 20 nt, synthetic construct
  misc_feature 1..20: note = HBV-targeting guide sequence portion
  source 1..20: mol_type = other RNA
ccaagggatactaacattga

SEQ ID NO: 2100 - RNA, 20 nt, synthetic construct
  misc_feature 1..20: note = HBV-targeting guide sequence portion
  source 1..20: mol_type = other RNA
ccaagggcaagtatttggtg

SEQ ID NO: 2101 - RNA, 20 nt, synthetic construct
  misc_feature 1..20: note = HBV-targeting guide sequence portion
  source 1..20: mol_type = other RNA
ccaaggtcttacataagagg

SEQ ID NO: 2102 - RNA, 20 nt, synthetic construct
  misc_feature 1..20: note = HBV-targeting guide sequence portion
  source 1..20: mol_type = other RNA
ccaagtctgtacagcatctt

SEQ ID NO: 2103 - RNA, 20 nt, synthetic construct
  misc_feature 1..20: note = HBV-targeting guide sequence portion
  source 1..20: mol_type = other RNA
ccaagtgtttgctgatgcaa

SEQ ID NO: 2104 - RNA, 20 nt, synthetic construct
  misc_feature 1..20: note = HBV-targeting guide sequence portion
  source 1..20: mol_type = other RNA
ccaataccacatcatccata

SEQ ID NO: 2105 - RNA, 20 nt, synthetic construct
  misc_feature 1..20: note = HBV-targeting guide sequence portion
  source 1..20: mol_type = other RNA
ccaatcaataggcctgttaa

SEQ ID NO: 2106 - RNA, 20 nt, synthetic construct
  misc_feature 1..20: note = HBV-targeting guide sequence portion
  source 1..20: mol_type = other RNA
ccaatcactcaccaacctcc

SEQ ID NO: 2107 - RNA, 20 nt, synthetic construct
  misc_feature 1..20: note = HBV-targeting guide sequence portion
  source 1..20: mol_type = other RNA
ccaatcctcgagaagattga

SEQ ID NO: 2108 - RNA, 20 nt, synthetic construct
  misc_feature 1..20: note = HBV-targeting guide sequence portion
  source 1..20: mol_type = other RNA
ccaatcgccagtcaggacgg

SEQ ID NO: 2109 - RNA, 20 nt, synthetic construct
  misc_feature 1..20: note = HBV-targeting guide sequence portion
  source 1..20: mol_type = other RNA
ccaatctggattgttggagt

SEQ ID NO: 2110 - RNA, 20 nt, synthetic construct
  misc_feature 1..20: note = HBV-targeting guide sequence portion
  source 1..20: mol_type = other RNA
ccaatgagggttaaagacag

SEQ ID NO: 2111 - RNA, 20 nt, synthetic construct
  misc_feature 1..20: note = HBV-targeting guide sequence portion
  source 1..20: mol_type = other RNA
ccaattcttgcccaaggtct

SEQ ID NO: 2112 - RNA, 20 nt, synthetic construct
  misc_feature 1..20: note = HBV-targeting guide sequence portion
  source 1..20: mol_type = other RNA
ccaatttatgcctacagcct

SEQ ID NO: 2113 - RNA, 20 nt, synthetic construct
  misc_feature 1..20: note = HBV-targeting guide sequence portion
  source 1..20: mol_type = other RNA
ccaattttcttttgtctttg

SEQ ID NO: 2114 - RNA, 20 nt, synthetic construct
  misc_feature 1..20: note = HBV-targeting guide sequence portion
  source 1..20: mol_type = other RNA
ccacaaaatcacatcataca

SEQ ID NO: 2115 - RNA, 20 nt, synthetic construct
  misc_feature 1..20: note = HBV-targeting guide sequence portion
  source 1..20: mol_type = other RNA
ccacaaccttccaccaaact

SEQ ID NO: 2116 - RNA, 20 nt, synthetic construct
  misc_feature 1..20: note = HBV-targeting guide sequence portion
  source 1..20: mol_type = other RNA
ccacaatagttgtctgaact

SEQ ID NO: 2117 - RNA, 20 nt, synthetic construct
  misc_feature 1..20: note = HBV-targeting guide sequence portion
  source 1..20: mol_type = other RNA
ccacaattcgttgacacact

SEQ ID NO: 2118 - RNA, 20 nt, synthetic construct
  misc_feature 1..20: note = HBV-targeting guide sequence portion
  source 1..20: mol_type = other RNA
ccacactccaaaagacacca

SEQ ID NO: 2119 - RNA, 20 nt, synthetic construct
  misc_feature 1..20: note = HBV-targeting guide sequence portion
  source 1..20: mol_type = other RNA
ccacagaatgaggcgctatg

SEQ ID NO: 2120 - RNA, 20 nt, synthetic construct
  misc_feature 1..20: note = HBV-targeting guide sequence portion
  source 1..20: mol_type = other RNA
ccacagtagctccaaattct

SEQ ID NO: 2121 - RNA, 20 nt, synthetic construct
  misc_feature 1..20: note = HBV-targeting guide sequence portion
  source 1..20: mol_type = other RNA
ccacatcatccatataactg

SEQ ID NO: 2122 - RNA, 20 nt, synthetic construct
  misc_feature 1..20: note = HBV-targeting guide sequence portion
  source 1..20: mol_type = other RNA
ccacattgtgtaaaaggggc

SEQ ID NO: 2123 - RNA, 20 nt, synthetic construct
  misc_feature 1..20: note = HBV-targeting guide sequence portion
  source 1..20: mol_type = other RNA
ccaccaaactctgcaagatc

SEQ ID NO: 2124 - RNA, 20 nt, synthetic construct
  misc_feature 1..20: note = HBV-targeting guide sequence portion
  source 1..20: mol_type = other RNA
ccaccaaatgcccctatcct

SEQ ID NO: 2125 - RNA, 20 nt, synthetic construct
  misc_feature 1..20: note = HBV-targeting guide sequence portion
  source 1..20: mol_type = other RNA
ccaccaattcttgcccaagg

SEQ ID NO: 2126 - RNA, 20 nt, synthetic construct
  misc_feature 1..20: note = HBV-targeting guide sequence portion
  source 1..20: mol_type = other RNA
ccaccacgagtctagactct

SEQ ID NO: 2127 - RNA, 20 nt, synthetic construct
  misc_feature 1..20: note = HBV-targeting guide sequence portion
  source 1..20: mol_type = other RNA
ccaccagcaatcctctggga

SEQ ID NO: 2128 - RNA, 20 nt, synthetic construct
  misc_feature 1..20: note = HBV-targeting guide sequence portion
  source 1..20: mol_type = other RNA
ccaccagcacgggaccctgc

SEQ ID NO: 2129 - RNA, 20 nt, synthetic construct
  misc_feature 1..20: note = HBV-targeting guide sequence portion
  source 1..20: mol_type = other RNA
ccaccagcagggagatacag

SEQ ID NO: 2130 - RNA, 20 nt, synthetic construct
  misc_feature 1..20: note = HBV-targeting guide sequence portion
  source 1..20: mol_type = other RNA
ccaccagttggacccagcct

SEQ ID NO: 2131 - RNA, 20 nt, synthetic construct
  misc_feature 1..20: note = HBV-targeting guide sequence portion
  source 1..20: mol_type = other RNA
ccacccaaggcacagcttgg

SEQ ID NO: 2132 - RNA, 20 nt, synthetic construct
  misc_feature 1..20: note = HBV-targeting guide sequence portion
  source 1..20: mol_type = other RNA
ccacccaggtagctagagtc

SEQ ID NO: 2133 - RNA, 20 nt, synthetic construct
  misc_feature 1..20: note = HBV-targeting guide sequence portion
  source 1..20: mol_type = other RNA
ccaccccaaaaggcctccgt

SEQ ID NO: 2134 - RNA, 20 nt, synthetic construct
  misc_feature 1..20: note = HBV-targeting guide sequence portion
  source 1..20: mol_type = other RNA
ccaccgcacggaggcctttt

SEQ ID NO: 2135 - RNA, 20 nt, synthetic construct
  misc_feature 1..20: note = HBV-targeting guide sequence portion
  source 1..20: mol_type = other RNA
ccaccgtgaacgcccaccaa

SEQ ID NO: 2136 - RNA, 20 nt, synthetic construct
  misc_feature 1..20: note = HBV-targeting guide sequence portion
  source 1..20: mol_type = other RNA
ccacctctgagaaacactca

SEQ ID NO: 2137 - RNA, 20 nt, synthetic construct
  misc_feature 1..20: note = HBV-targeting guide sequence portion
  source 1..20: mol_type = other RNA
ccaccttatgagtccaaggg

SEQ ID NO: 2138 - RNA, 20 nt, synthetic construct
  misc_feature 1..20: note = HBV-targeting guide sequence portion
  source 1..20: mol_type = other RNA
ccacgagtctagactctgcg

SEQ ID NO: 2139 - RNA, 20 nt, synthetic construct
  misc_feature 1..20: note = HBV-targeting guide sequence portion
  source 1..20: mol_type = other RNA
ccacgcatgcgctgatggcc

SEQ ID NO: 2140 - RNA, 20 nt, synthetic construct
  misc_feature 1..20: note = HBV-targeting guide sequence portion
  source 1..20: mol_type = other RNA
ccacggggcgcacctctctt

SEQ ID NO: 2141 - RNA, 20 nt, synthetic construct
  misc_feature 1..20: note = HBV-targeting guide sequence portion
  source 1..20: mol_type = other RNA
ccactcccataggaattttc

SEQ ID NO: 2142 - RNA, 20 nt, synthetic construct
  misc_feature 1..20: note = HBV-targeting guide sequence portion
  source 1..20: mol_type = other RNA
ccactgaacaaatggcacta

SEQ ID NO: 2143 - RNA, 20 nt, synthetic construct
  misc_feature 1..20: note = HBV-targeting guide sequence portion
  source 1..20: mol_type = other RNA
ccactgcatggcctgaggat

SEQ ID NO: 2144 - RNA, 20 nt, synthetic construct
  misc_feature 1..20: note = HBV-targeting guide sequence portion
  source 1..20: mol_type = other RNA
ccactggttggggcttggtc

SEQ ID NO: 2145 - RNA, 20 nt, synthetic construct
  misc_feature 1..20: note = HBV-targeting guide sequence portion
  source 1..20: mol_type = other RNA
ccactgtttggctttcagtt

SEQ ID NO: 2146 - RNA, 20 nt, synthetic construct
  misc_feature 1..20: note = HBV-targeting guide sequence portion
  source 1..20: mol_type = other RNA
ccagaacatctagttaatca

SEQ ID NO: 2147 - RNA, 20 nt, synthetic construct
  misc_feature 1..20: note = HBV-targeting guide sequence portion
  source 1..20: mol_type = other RNA
ccagaagaaccaacaagaag

SEQ ID NO: 2148 - RNA, 20 nt, synthetic construct
  misc_feature 1..20: note = HBV-targeting guide sequence portion
  source 1..20: mol_type = other RNA
ccagaagacccacaattcgt

SEQ ID NO: 2149 - RNA, 20 nt, synthetic construct
  misc_feature 1..20: note = HBV-targeting guide sequence portion
  source 1..20: mol_type = other RNA
ccagaccggctgcgagcaaa

SEQ ID NO: 2150 - RNA, 20 nt, synthetic construct
  misc_feature 1..20: note = HBV-targeting guide sequence portion
  source 1..20: mol_type = other RNA
ccagacgccaacaaggtagg

SEQ ID NO: 2151 - RNA, 20 nt, synthetic construct
  misc_feature 1..20: note = HBV-targeting guide sequence portion
  source 1..20: mol_type = other RNA
ccagaggattgctggtggaa

SEQ ID NO: 2152 - RNA, 20 nt, synthetic construct
  misc_feature 1..20: note = HBV-targeting guide sequence portion
  source 1..20: mol_type = other RNA
ccagagtgagaggcctgtat

SEQ ID NO: 2153 - RNA, 20 nt, synthetic construct
  misc_feature 1..20: note = HBV-targeting guide sequence portion
  source 1..20: mol_type = other RNA
ccagattgggacttcaatcc

SEQ ID NO: 2154 - RNA, 20 nt, synthetic construct
  misc_feature 1..20: note = HBV-targeting guide sequence portion
  source 1..20: mol_type = other RNA
ccagcaaagaattgcttgcc

SEQ ID NO: 2155 - RNA, 20 nt, synthetic construct
  misc_feature 1..20: note = HBV-targeting guide sequence portion
  source 1..20: mol_type = other RNA
ccagcaaatccgcctcctgc

SEQ ID NO: 2156 - RNA, 20 nt, synthetic construct
  misc_feature 1..20: note = HBV-targeting guide sequence portion
  source 1..20: mol_type = other RNA
ccagcaatcctctgggattc

SEQ ID NO: 2157 - RNA, 20 nt, synthetic construct
  misc_feature 1..20: note = HBV-targeting guide sequence portion
  source 1..20: mol_type = other RNA
ccagcaccatgcaacttttt

SEQ ID NO: 2158 - RNA, 20 nt, synthetic construct
  misc_feature 1..20: note = HBV-targeting guide sequence portion
  source 1..20: mol_type = other RNA
ccagcacgggaccctgcaga

SEQ ID NO: 2159 - RNA, 20 nt, synthetic construct
  misc_feature 1..20: note = HBV-targeting guide sequence portion
  source 1..20: mol_type = other RNA
ccagcagggagatacaggcc

SEQ ID NO: 2160 - RNA, 20 nt, synthetic construct
  misc_feature 1..20: note = HBV-targeting guide sequence portion
  source 1..20: mol_type = other RNA
ccagccttcagagcaaactc

SEQ ID NO: 2161 - RNA, 20 nt, synthetic construct
  misc_feature 1..20: note = HBV-targeting guide sequence portion
  source 1..20: mol_type = other RNA
ccagcgataaccaggacaag

SEQ ID NO: 2162 - RNA, 20 nt, synthetic construct
  misc_feature 1..20: note = HBV-targeting guide sequence portion
  source 1..20: mol_type = other RNA
ccagctcctaccttgttggc

SEQ ID NO: 2163 - RNA, 20 nt, synthetic construct
  misc_feature 1..20: note = HBV-targeting guide sequence portion
  source 1..20: mol_type = other RNA
ccagcttatagaccaccaaa

SEQ ID NO: 2164 - RNA, 20 nt, synthetic construct
  misc_feature 1..20: note = HBV-targeting guide sequence portion
  source 1..20: mol_type = other RNA
ccaggacaagttggaggaca

SEQ ID NO: 2165 - RNA, 20 nt, synthetic construct
  misc_feature 1..20: note = HBV-targeting guide sequence portion
  source 1..20: mol_type = other RNA
ccaggatcatcaaccaccag

SEQ ID NO: 2166 - RNA, 20 nt, synthetic construct
  misc_feature 1..20: note = HBV-targeting guide sequence portion
  source 1..20: mol_type = other RNA
ccaggatgatgggatgggaa

SEQ ID NO: 2167 - RNA, 20 nt, synthetic construct
  misc_feature 1..20: note = HBV-targeting guide sequence portion
  source 1..20: mol_type = other RNA
ccaggcaacggccaggtctg

SEQ ID NO: 2168 - RNA, 20 nt, synthetic construct
  misc_feature 1..20: note = HBV-targeting guide sequence portion
  source 1..20: mol_type = other RNA
ccagggatccttgttgggat

SEQ ID NO: 2169 - RNA, 20 nt, synthetic construct
  misc_feature 1..20: note = HBV-targeting guide sequence portion
  source 1..20: mol_type = other RNA
ccaggtagctagagtcatta

SEQ ID NO: 2170 - RNA, 20 nt, synthetic construct
  misc_feature 1..20: note = HBV-targeting guide sequence portion
  source 1..20: mol_type = other RNA
ccaggtctgtgccaagtgtt

SEQ ID NO: 2171 - RNA, 20 nt, synthetic construct
  misc_feature 1..20: note = HBV-targeting guide sequence portion
  source 1..20: mol_type = other RNA
ccagtcaggacggcagccta

SEQ ID NO: 2172 - RNA, 20 nt, synthetic construct
  misc_feature 1..20: note = HBV-targeting guide sequence portion
  source 1..20: mol_type = other RNA
ccagtctttaaacaaacagt

SEQ ID NO: 2173 - RNA, 20 nt, synthetic construct
  misc_feature 1..20: note = HBV-targeting guide sequence portion
  source 1..20: mol_type = other RNA
ccagtgggggttgcatcagc

SEQ ID NO: 2174 - RNA, 20 nt, synthetic construct
  misc_feature 1..20: note = HBV-targeting guide sequence portion
  source 1..20: mol_type = other RNA
ccagttcaggaacagtaaac

SEQ ID NO: 2175 - RNA, 20 nt, synthetic construct
  misc_feature 1..20: note = HBV-targeting guide sequence portion
  source 1..20: mol_type = other RNA
ccagttggacccagccttca

SEQ ID NO: 2176 - RNA, 20 nt, synthetic construct
  misc_feature 1..20: note = HBV-targeting guide sequence portion
  source 1..20: mol_type = other RNA
ccagttggcagcacagccta

SEQ ID NO: 2177 - RNA, 20 nt, synthetic construct
  misc_feature 1..20: note = HBV-targeting guide sequence portion
  source 1..20: mol_type = other RNA
ccatactgcactcaggcaag

SEQ ID NO: 2178 - RNA, 20 nt, synthetic construct
  misc_feature 1..20: note = HBV-targeting guide sequence portion
  source 1..20: mol_type = other RNA
ccatactgcggaactcctag

SEQ ID NO: 2179 - RNA, 20 nt, synthetic construct
  misc_feature 1..20: note = HBV-targeting guide sequence portion
  source 1..20: mol_type = other RNA
ccatagagtgtgtaaatagt

SEQ ID NO: 2180 - RNA, 20 nt, synthetic construct
  misc_feature 1..20: note = HBV-targeting guide sequence portion
  source 1..20: mol_type = other RNA
ccataggaattttccgaaag

SEQ ID NO: 2181 - RNA, 20 nt, synthetic construct
  misc_feature 1..20: note = HBV-targeting guide sequence portion
  source 1..20: mol_type = other RNA
ccatataaagaatttggagc

SEQ ID NO: 2182 - RNA, 20 nt, synthetic construct
  misc_feature 1..20: note = HBV-targeting guide sequence portion
  source 1..20: mol_type = other RNA
ccatataactgaaagccaaa

SEQ ID NO: 2183 - RNA, 20 nt, synthetic construct
  misc_feature 1..20: note = HBV-targeting guide sequence portion
  source 1..20: mol_type = other RNA
ccatatgagtgttgacataa

SEQ ID NO: 2184 - RNA, 20 nt, synthetic construct
  misc_feature 1..20: note = HBV-targeting guide sequence portion
  source 1..20: mol_type = other RNA
ccatattcttgggaacaaga

SEQ ID NO: 2185 - RNA, 20 nt, synthetic construct
  misc_feature 1..20: note = HBV-targeting guide sequence portion
  source 1..20: mol_type = other RNA
ccatcagcgcatgcgtggaa

SEQ ID NO: 2186 - RNA, 20 nt, synthetic construct
  misc_feature 1..20: note = HBV-targeting guide sequence portion
  source 1..20: mol_type = other RNA
ccatcatcctgggctttcgg

SEQ ID NO: 2187 - RNA, 20 nt, synthetic construct
  misc_feature 1..20: note = HBV-targeting guide sequence portion
  source 1..20: mol_type = other RNA
ccatcccatcatcctgggct

SEQ ID NO: 2188 - RNA, 20 nt, synthetic construct
  misc_feature 1..20: note = HBV-targeting guide sequence portion
  source 1..20: mol_type = other RNA
ccatccgaaggttttgtaca

SEQ ID NO: 2189 - RNA, 20 nt, synthetic construct
  misc_feature 1..20: note = HBV-targeting guide sequence portion
  source 1..20: mol_type = other RNA
ccatctcgaggccgcttggg

SEQ ID NO: 2190 - RNA, 20 nt, synthetic construct
  misc_feature 1..20: note = HBV-targeting guide sequence portion
  source 1..20: mol_type = other RNA
ccatctctttgttttgttag

SEQ ID NO: 2191 - RNA, 20 nt, synthetic construct
  misc_feature 1..20: note = HBV-targeting guide sequence portion
  source 1..20: mol_type = other RNA
ccatgaaattaagagaataa

SEQ ID NO: 2192 - RNA, 20 nt, synthetic construct
  misc_feature 1..20: note = HBV-targeting guide sequence portion
  source 1..20: mol_type = other RNA
ccatgcaactttttcacctc

SEQ ID NO: 2193 - RNA, 20 nt, synthetic construct
  misc_feature 1..20: note = HBV-targeting guide sequence portion
  source 1..20: mol_type = other RNA
ccatgccctaaagccaccca

SEQ ID NO: 2194 - RNA, 20 nt, synthetic construct
  misc_feature 1..20: note = HBV-targeting guide sequence portion
  source 1..20: mol_type = other RNA
ccatgcgacgtgcagaggtg

SEQ ID NO: 2195 - RNA, 20 nt, synthetic construct
  misc_feature 1..20: note = HBV-targeting guide sequence portion
  source 1..20: mol_type = other RNA
ccatgctgtagctcttgttc

SEQ ID NO: 2196 - RNA, 20 nt, synthetic construct
  misc_feature 1..20: note = HBV-targeting guide sequence portion
  source 1..20: mol_type = other RNA
ccatggctgctaggctgtgc

SEQ ID NO: 2197 - RNA, 20 nt, synthetic construct
  misc_feature 1..20: note = HBV-targeting guide sequence portion
  source 1..20: mol_type = other RNA
ccatgggaacgatgtatatt

SEQ ID NO: 2198 - RNA, 20 nt, synthetic construct
  misc_feature 1..20: note = HBV-targeting guide sequence portion
  source 1..20: mol_type = other RNA
ccatgttcagcgcagggtcc

SEQ ID NO: 2199 - RNA, 20 nt, synthetic construct
  misc_feature 1..20: note = HBV-targeting guide sequence portion
  source 1..20: mol_type = other RNA
ccatttgttcagtggttcgt

SEQ ID NO: 2200 - RNA, 20 nt, synthetic construct
  misc_feature 1..20: note = HBV-targeting guide sequence portion
  source 1..20: mol_type = other RNA
cccaaaaggcctccgtgcgg

SEQ ID NO: 2201 - RNA, 20 nt, synthetic construct
  misc_feature 1..20: note = HBV-targeting guide sequence portion
  source 1..20: mol_type = other RNA
cccaaagacaaaagaaaatt

SEQ ID NO: 2202 - RNA, 20 nt, synthetic construct
  misc_feature 1..20: note = HBV-targeting guide sequence portion
  source 1..20: mol_type = other RNA
cccaacaaggatccctggcc

SEQ ID NO: 2203 - RNA, 20 nt, synthetic construct
  misc_feature 1..20: note = HBV-targeting guide sequence portion
  source 1..20: mol_type = other RNA
cccaacaatcaatgacatag

SEQ ID NO: 2204 - RNA, 20 nt, synthetic construct
  misc_feature 1..20: note = HBV-targeting guide sequence portion
  source 1..20: mol_type = other RNA
cccaaccagtgggggttgca

SEQ ID NO: 2205 - RNA, 20 nt, synthetic construct
  misc_feature 1..20: note = HBV-targeting guide sequence portion
  source 1..20: mol_type = other RNA
cccaacctccaatcactcac

SEQ ID NO: 2206 - RNA, 20 nt, synthetic construct
  misc_feature 1..20: note = HBV-targeting guide sequence portion
  source 1..20: mol_type = other RNA
cccaactcctcccagtcttt

SEQ ID NO: 2207 - RNA, 20 nt, synthetic construct
  misc_feature 1..20: note = HBV-targeting guide sequence portion
  source 1..20: mol_type = other RNA
cccaagaatatggtgaccca

SEQ ID NO: 2208 - RNA, 20 nt, synthetic construct
  misc_feature 1..20: note = HBV-targeting guide sequence portion
  source 1..20: mol_type = other RNA
cccaagcggcctcgagatgg

SEQ ID NO: 2209 - RNA, 20 nt, synthetic construct
  misc_feature 1..20: note = HBV-targeting guide sequence portion
  source 1..20: mol_type = other RNA
cccaaggcacagcttggagg

SEQ ID NO: 2210 - RNA, 20 nt, synthetic construct
  misc_feature 1..20: note = HBV-targeting guide sequence portion
  source 1..20: mol_type = other RNA
cccaaggtcttacataagag

SEQ ID NO: 2211 - RNA, 20 nt, synthetic construct
  misc_feature 1..20: note = HBV-targeting guide sequence portion
  source 1..20: mol_type = other RNA
cccaataccacatcatccat

SEQ ID NO: 2212 - RNA, 20 nt, synthetic construct
  misc_feature 1..20: note = HBV-targeting guide sequence portion
  source 1..20: mol_type = other RNA
cccaatcctcgagaagattg

SEQ ID NO: 2213 - RNA, 20 nt, synthetic construct
  misc_feature 1..20: note = HBV-targeting guide sequence portion
  source 1..20: mol_type = other RNA
cccaatctggattgttggag

SEQ ID NO: 2214 - RNA, 20 nt, synthetic construct
  misc_feature 1..20: note = HBV-targeting guide sequence portion
  source 1..20: mol_type = other RNA
cccacaattcgttgacacac

SEQ ID NO: 2215 - RNA, 20 nt, synthetic construct
  misc_feature 1..20: note = HBV-targeting guide sequence portion
  source 1..20: mol_type = other RNA
cccacagaatgaggcgctat

SEQ ID NO: 2216 - RNA, 20 nt, synthetic construct
  misc_feature 1..20: note = HBV-targeting guide sequence portion
  source 1..20: mol_type = other RNA
cccaccaattcttgcccaag

SEQ ID NO: 2217 - RNA, 20 nt, synthetic construct
  misc_feature 1..20: note = HBV-targeting guide sequence portion
  source 1..20: mol_type = other RNA
cccacccaggtagctagagt

SEQ ID NO: 2218 - RNA, 20 nt, synthetic construct
  misc_feature 1..20: note = HBV-targeting guide sequence portion
  source 1..20: mol_type = other RNA
cccaccgcacggaggccttt

SEQ ID NO: 2219 - RNA, 20 nt, synthetic construct
  misc_feature 1..20: note = HBV-targeting guide sequence portion
  source 1..20: mol_type = other RNA
cccaccttatgagtccaagg

SEQ ID NO: 2220 - RNA, 20 nt, synthetic construct
  misc_feature 1..20: note = HBV-targeting guide sequence portion
  source 1..20: mol_type = other RNA
cccactcccataggaatttt

SEQ ID NO: 2221 - RNA, 20 nt, synthetic construct
  misc_feature 1..20: note = HBV-targeting guide sequence portion
  source 1..20: mol_type = other RNA
cccactggttggggcttggt

SEQ ID NO: 2222 - RNA, 20 nt, synthetic construct
  misc_feature 1..20: note = HBV-targeting guide sequence portion
  source 1..20: mol_type = other RNA
cccactgtttggctttcagt

SEQ ID NO: 2223 - RNA, 20 nt, synthetic construct
  misc_feature 1..20: note = HBV-targeting guide sequence portion
  source 1..20: mol_type = other RNA
cccagaagacccacaattcg

SEQ ID NO: 2224 - RNA, 20 nt, synthetic construct
  misc_feature 1..20: note = HBV-targeting guide sequence portion
  source 1..20: mol_type = other RNA
cccagaggattgctggtgga

SEQ ID NO: 2225 - RNA, 20 nt, synthetic construct
  misc_feature 1..20: note = HBV-targeting guide sequence portion
  source 1..20: mol_type = other RNA
cccagagtgagaggcctgta

SEQ ID NO: 2226 - RNA, 20 nt, synthetic construct
  misc_feature 1..20: note = HBV-targeting guide sequence portion
  source 1..20: mol_type = other RNA
cccagcaaagaattgcttgc

SEQ ID NO: 2227 - RNA, 20 nt, synthetic construct
  misc_feature 1..20: note = HBV-targeting guide sequence portion
  source 1..20: mol_type = other RNA
cccagccttcagagcaaact

SEQ ID NO: 2228 - RNA, 20 nt, synthetic construct
  misc_feature 1..20: note = HBV-targeting guide sequence portion
  source 1..20: mol_type = other RNA
cccaggatgatgggatggga

SEQ ID NO: 2229 - RNA, 20 nt, synthetic construct
  misc_feature 1..20: note = HBV-targeting guide sequence portion
  source 1..20: mol_type = other RNA
cccaggtagctagagtcatt

SEQ ID NO: 2230 - RNA, 20 nt, synthetic construct
  misc_feature 1..20: note = HBV-targeting guide sequence portion
  source 1..20: mol_type = other RNA
cccagtctttaaacaaacag

SEQ ID NO: 2231 - RNA, 20 nt, synthetic construct
  misc_feature 1..20: note = HBV-targeting guide sequence portion
  source 1..20: mol_type = other RNA
cccataggaattttccgaaa

SEQ ID NO: 2232 - RNA, 20 nt, synthetic construct
  misc_feature 1..20: note = HBV-targeting guide sequence portion
  source 1..20: mol_type = other RNA
cccatataaagaatttggag

SEQ ID NO: 2233 - RNA, 20 nt, synthetic construct
  misc_feature 1..20: note = HBV-targeting guide sequence portion
  source 1..20: mol_type = other RNA
cccatatgagtgttgacata

SEQ ID NO: 2234 - RNA, 20 nt, synthetic construct
  misc_feature 1..20: note = HBV-targeting guide sequence portion
  source 1..20: mol_type = other RNA
cccatcatcctgggctttcg

SEQ ID NO: 2235 - RNA, 20 nt, synthetic construct
  misc_feature 1..20: note = HBV-targeting guide sequence portion
  source 1..20: mol_type = other RNA
cccatcccatcatcctgggc

SEQ ID NO: 2236 - RNA, 20 nt, synthetic construct
  misc_feature 1..20: note = HBV-targeting guide sequence portion
  source 1..20: mol_type = other RNA
cccatctcgaggccgcttgg

SEQ ID NO: 2237 - RNA, 20 nt, synthetic construct
  misc_feature 1..20: note = HBV-targeting guide sequence portion
  source 1..20: mol_type = other RNA
cccatctctttgttttgtta

SEQ ID NO: 2238 - RNA, 20 nt, synthetic construct
  misc_feature 1..20: note = HBV-targeting guide sequence portion
  source 1..20: mol_type = other RNA
cccatgaaattaagagaata

SEQ ID NO: 2239 - RNA, 20 nt, synthetic construct
  misc_feature 1..20: note = HBV-targeting guide sequence portion
  source 1..20: mol_type = other RNA
cccatgctgtagctcttgtt

SEQ ID NO: 2240 - RNA, 20 nt, synthetic construct
  misc_feature 1..20: note = HBV-targeting guide sequence portion
  source 1..20: mol_type = other RNA
cccatggctgctaggctgtg

SEQ ID NO: 2241 - RNA, 20 nt, synthetic construct
  misc_feature 1..20: note = HBV-targeting guide sequence portion
  source 1..20: mol_type = other RNA
ccccaaaaggcctccgtgcg

SEQ ID NO: 2242 - RNA, 20 nt, synthetic construct
  misc_feature 1..20: note = HBV-targeting guide sequence portion
  source 1..20: mol_type = other RNA
ccccaacaatcaatgacata

SEQ ID NO: 2243 - RNA, 20 nt, synthetic construct
  misc_feature 1..20: note = HBV-targeting guide sequence portion
  source 1..20: mol_type = other RNA
ccccaaccagtgggggttgc

SEQ ID NO: 2244 - RNA, 20 nt, synthetic construct
  misc_feature 1..20: note = HBV-targeting guide sequence portion
  source 1..20: mol_type = other RNA
ccccaacctccaatcactca

SEQ ID NO: 2245 - RNA, 20 nt, synthetic construct
  misc_feature 1..20: note = HBV-targeting guide sequence portion
  source 1..20: mol_type = other RNA
ccccaactcctcccagtctt

SEQ ID NO: 2246 - RNA, 20 nt, synthetic construct
  misc_feature 1..20: note = HBV-targeting guide sequence portion
  source 1..20: mol_type = other RNA
ccccaagcggcctcgagatg

SEQ ID NO: 2247 - RNA, 20 nt, synthetic construct
  misc_feature 1..20: note = HBV-targeting guide sequence portion
  source 1..20: mol_type = other RNA
ccccaataccacatcatcca

SEQ ID NO: 2248 - RNA, 20 nt, synthetic construct
  misc_feature 1..20: note = HBV-targeting guide sequence portion
  source 1..20: mol_type = other RNA
ccccaatcctcgagaagatt

SEQ ID NO: 2249 - RNA, 20 nt, synthetic construct
  misc_feature 1..20: note = HBV-targeting guide sequence portion
  source 1..20: mol_type = other RNA
ccccaccgcacggaggcctt

SEQ ID NO: 2250 - RNA, 20 nt, synthetic construct
  misc_feature 1..20: note = HBV-targeting guide sequence portion
  source 1..20: mol_type = other RNA
ccccactggttggggcttgg

SEQ ID NO: 2251 - RNA, 20 nt, synthetic construct
  misc_feature 1..20: note = HBV-targeting guide sequence portion
  source 1..20: mol_type = other RNA
ccccactgtttggctttcag

SEQ ID NO: 2252 - RNA, 20 nt, synthetic construct
  misc_feature 1..20: note = HBV-targeting guide sequence portion
  source 1..20: mol_type = other RNA
ccccagcaaagaattgcttg

SEQ ID NO: 2253 - RNA, 20 nt, synthetic construct
  misc_feature 1..20: note = HBV-targeting guide sequence portion
  source 1..20: mol_type = other RNA
ccccatctctttgttttgtt

SEQ ID NO: 2254 - RNA, 20 nt, synthetic construct
  misc_feature 1..20: note = HBV-targeting guide sequence portion
  source 1..20: mol_type = other RNA
ccccatgctgtagctcttgt

SEQ ID NO: 2255 - RNA, 20 nt, synthetic construct
  misc_feature 1..20: note = HBV-targeting guide sequence portion
  source 1..20: mol_type = other RNA
cccccaactcctcccagtct

SEQ ID NO: 2256 - RNA, 20 nt, synthetic construct
  misc_feature 1..20: note = HBV-targeting guide sequence portion
  source 1..20: mol_type = other RNA
cccccaataccacatcatcc

SEQ ID NO: 2257 - RNA, 20 nt, synthetic construct
  misc_feature 1..20: note = HBV-targeting guide sequence portion
  source 1..20: mol_type = other RNA
cccccactggttggggcttg

SEQ ID NO: 2258 - RNA, 20 nt, synthetic construct
  misc_feature 1..20: note = HBV-targeting guide sequence portion
  source 1..20: mol_type = other RNA
cccccactgtttggctttca

SEQ ID NO: 2259 - RNA, 20 nt, synthetic construct
  misc_feature 1..20: note = HBV-targeting guide sequence portion
  source 1..20: mol_type = other RNA
ccccctagaaaattgagaga

SEQ ID NO: 2260 - RNA, 20 nt, synthetic construct
  misc_feature 1..20: note = HBV-targeting guide sequence portion
  source 1..20: mol_type = other RNA
ccccgagattgagatcttct

SEQ ID NO: 2261 - RNA, 20 nt, synthetic construct
  misc_feature 1..20: note = HBV-targeting guide sequence portion
  source 1..20: mol_type = other RNA
ccccgcctgtaacacgagca

SEQ ID NO: 2262 - RNA, 20 nt, synthetic construct
  misc_feature 1..20: note = HBV-targeting guide sequence portion
  source 1..20: mol_type = other RNA
ccccgctgtctccacctctg

SEQ ID NO: 2263 - RNA, 20 nt, synthetic construct
  misc_feature 1..20: note = HBV-targeting guide sequence portion
  source 1..20: mol_type = other RNA
ccccgtaaaatttcccacct

SEQ ID NO: 2264 - RNA, 20 nt, synthetic construct
  misc_feature 1..20: note = HBV-targeting guide sequence portion
  source 1..20: mol_type = other RNA
ccccgtctgtgccttctcat

SEQ ID NO: 2265 - RNA, 20 nt, synthetic construct
  misc_feature 1..20: note = HBV-targeting guide sequence portion
  source 1..20: mol_type = other RNA
ccccgtggtcggtcggaacg

SEQ ID NO: 2266 - RNA, 20 nt, synthetic construct
  misc_feature 1..20: note = HBV-targeting guide sequence portion
  source 1..20: mol_type = other RNA
ccccgttgccaggcaacggc

SEQ ID NO: 2267 - RNA, 20 nt, synthetic construct
  misc_feature 1..20: note = HBV-targeting guide sequence portion
  source 1..20: mol_type = other RNA
cccctagaaaattgagagaa

SEQ ID NO: 2268 - RNA, 20 nt, synthetic construct
  misc_feature 1..20: note = HBV-targeting guide sequence portion
  source 1..20: mol_type = other RNA
cccctagaagaagaactccc

SEQ ID NO: 2269 - RNA, 20 nt, synthetic construct
  misc_feature 1..20: note = HBV-targeting guide sequence portion
  source 1..20: mol_type = other RNA
cccctatcctatcaacactt

SEQ ID NO: 2270 - RNA, 20 nt, synthetic construct
  misc_feature 1..20: note = HBV-targeting guide sequence portion
  source 1..20: mol_type = other RNA
cccctgctcgtgttacaggc

SEQ ID NO: 2271 - RNA, 20 nt, synthetic construct
  misc_feature 1..20: note = HBV-targeting guide sequence portion
  source 1..20: mol_type = other RNA
ccccttttacacaatgtggt

SEQ ID NO: 2272 - RNA, 20 nt, synthetic construct
  misc_feature 1..20: note = HBV-targeting guide sequence portion
  source 1..20: mol_type = other RNA
cccgaatgctccagctccta

SEQ ID NO: 2273 - RNA, 20 nt, synthetic construct
  misc_feature 1..20: note = HBV-targeting guide sequence portion
  source 1..20: mol_type = other RNA
cccgaccaccagttggaccc

SEQ ID NO: 2274 - RNA, 20 nt, synthetic construct
  misc_feature 1..20: note = HBV-targeting guide sequence portion
  source 1..20: mol_type = other RNA
cccgagaatgtttgctccag

SEQ ID NO: 2275 - RNA, 20 nt, synthetic construct
  misc_feature 1..20: note = HBV-targeting guide sequence portion
  source 1..20: mol_type = other RNA
cccgagattgagatcttctg

SEQ ID NO: 2276 - RNA, 20 nt, synthetic construct
  misc_feature 1..20: note = HBV-targeting guide sequence portion
  source 1..20: mol_type = other RNA
cccgatacagagctgcggcg

SEQ ID NO: 2277 - RNA, 20 nt, synthetic construct
  misc_feature 1..20: note = HBV-targeting guide sequence portion
  source 1..20: mol_type = other RNA
cccgcaaatatacatcgttc

SEQ ID NO: 2278 - RNA, 20 nt, synthetic construct
  misc_feature 1..20: note = HBV-targeting guide sequence portion
  source 1..20: mol_type = other RNA
cccgcctgtaacacgagcag

SEQ ID NO: 2279 - RNA, 20 nt, synthetic construct
  misc_feature 1..20: note = HBV-targeting guide sequence portion
  source 1..20: mol_type = other RNA
cccgccttccatagagtgtg

SEQ ID NO: 2280 - RNA, 20 nt, synthetic construct
  misc_feature 1..20: note = HBV-targeting guide sequence portion
  source 1..20: mol_type = other RNA
cccgcgcaggatccagttgg

SEQ ID NO: 2281 - RNA, 20 nt, synthetic construct
  misc_feature 1..20: note = HBV-targeting guide sequence portion
  source 1..20: mol_type = other RNA
cccgcggacgacccatctcg

SEQ ID NO: 2282 - RNA, 20 nt, synthetic construct
  misc_feature 1..20: note = HBV-targeting guide sequence portion
  source 1..20: mol_type = other RNA
cccgctgtctccacctctga

SEQ ID NO: 2283 - RNA, 20 nt, synthetic construct
  misc_feature 1..20: note = HBV-targeting guide sequence portion
  source 1..20: mol_type = other RNA
cccgcttacagttaatgaga

SEQ ID NO: 2284 - RNA, 20 nt, synthetic construct
  misc_feature 1..20: note = HBV-targeting guide sequence portion
  source 1..20: mol_type = other RNA
cccggttaacaggcctattg

SEQ ID NO: 2285 - RNA, 20 nt, synthetic construct
  misc_feature 1..20: note = HBV-targeting guide sequence portion
  source 1..20: mol_type = other RNA
cccgtaaaatttcccacctt

SEQ ID NO: 2286 - RNA, 20 nt, synthetic construct
  misc_feature 1..20: note = HBV-targeting guide sequence portion
  source 1..20: mol_type = other RNA
cccgtcggcgctgaatcccg

SEQ ID NO: 2287 - RNA, 20 nt, synthetic construct
  misc_feature 1..20: note = HBV-targeting guide sequence portion
  source 1..20: mol_type = other RNA
cccgtctgtcctctaattcc

SEQ ID NO: 2288 - RNA, 20 nt, synthetic construct
  misc_feature 1..20: note = HBV-targeting guide sequence portion
  source 1..20: mol_type = other RNA
cccgtctgtgccttctcatc

SEQ ID NO: 2289 - RNA, 20 nt, synthetic construct
  misc_feature 1..20: note = HBV-targeting guide sequence portion
  source 1..20: mol_type = other RNA
cccgtgctggtggttgatga

SEQ ID NO: 2290 - RNA, 20 nt, synthetic construct
  misc_feature 1..20: note = HBV-targeting guide sequence portion
  source 1..20: mol_type = other RNA
cccgtggtcggtcggaacgg

SEQ ID NO: 2291 - RNA, 20 nt, synthetic construct
  misc_feature 1..20: note = HBV-targeting guide sequence portion
  source 1..20: mol_type = other RNA
cccgttgccaggcaacggcc

SEQ ID NO: 2292 - RNA, 20 nt, synthetic construct
  misc_feature 1..20: note = HBV-targeting guide sequence portion
  source 1..20: mol_type = other RNA
cccgtttctcttggctcagt

SEQ ID NO: 2293 - RNA, 20 nt, synthetic construct
  misc_feature 1..20: note = HBV-targeting guide sequence portion
  source 1..20: mol_type = other RNA
ccctaaagccacccaaggca

SEQ ID NO: 2294 - RNA, 20 nt, synthetic construct
  misc_feature 1..20: note = HBV-targeting guide sequence portion
  source 1..20: mol_type = other RNA
ccctaacaaaacaaagagat

SEQ ID NO: 2295 - RNA, 20 nt, synthetic construct
  misc_feature 1..20: note = HBV-targeting guide sequence portion
  source 1..20: mol_type = other RNA
ccctacgaaccactgaacaa

SEQ ID NO: 2296 - RNA, 20 nt, synthetic construct
  misc_feature 1..20: note = HBV-targeting guide sequence portion
  source 1..20: mol_type = other RNA
ccctagaaaattgagagaag

SEQ ID NO: 2297 - RNA, 20 nt, synthetic construct
  misc_feature 1..20: note = HBV-targeting guide sequence portion
  source 1..20: mol_type = other RNA
ccctagaagaagaactccct

SEQ ID NO: 2298 - RNA, 20 nt, synthetic construct
  misc_feature 1..20: note = HBV-targeting guide sequence portion
  source 1..20: mol_type = other RNA
ccctagatgcttgatcttct

SEQ ID NO: 2299 - RNA, 20 nt, synthetic construct
  misc_feature 1..20: note = HBV-targeting guide sequence portion
  source 1..20: mol_type = other RNA
ccctagcccgaatgctccag

SEQ ID NO: 2300 - RNA, 20 nt, synthetic construct
  misc_feature 1..20: note = HBV-targeting guide sequence portion
  source 1..20: mol_type = other RNA
ccctatcctatcaacacttc

SEQ ID NO: 2301 - RNA, 20 nt, synthetic construct
  misc_feature 1..20: note = HBV-targeting guide sequence portion
  source 1..20: mol_type = other RNA
ccctcaggctcagggcataa

SEQ ID NO: 2302 - RNA, 20 nt, synthetic construct
  misc_feature 1..20: note = HBV-targeting guide sequence portion
  source 1..20: mol_type = other RNA
ccctcattggaaaacaccct

SEQ ID NO: 2303 - RNA, 20 nt, synthetic construct
  misc_feature 1..20: note = HBV-targeting guide sequence portion
  source 1..20: mol_type = other RNA
ccctcctgttgctgtacaaa

SEQ ID NO: 2304 - RNA, 20 nt, synthetic construct
  misc_feature 1..20: note = HBV-targeting guide sequence portion
  source 1..20: mol_type = other RNA
ccctcgcctcgcagacgaag

SEQ ID NO: 2305 - RNA, 20 nt, synthetic construct
  misc_feature 1..20: note = HBV-targeting guide sequence portion
  source 1..20: mol_type = other RNA
ccctcttttcctaatataca

SEQ ID NO: 2306 - RNA, 20 nt, synthetic construct
  misc_feature 1..20: note = HBV-targeting guide sequence portion
  source 1..20: mol_type = other RNA
ccctgagcctgagggctcca

SEQ ID NO: 2307 - RNA, 20 nt, synthetic construct
  misc_feature 1..20: note = HBV-targeting guide sequence portion
  source 1..20: mol_type = other RNA
ccctgcagaacctgcacgac

SEQ ID NO: 2308 - RNA, 20 nt, synthetic construct
  misc_feature 1..20: note = HBV-targeting guide sequence portion
  source 1..20: mol_type = other RNA
ccctgcgctgaacatggaga

SEQ ID NO: 2309 - RNA, 20 nt, synthetic construct
  misc_feature 1..20: note = HBV-targeting guide sequence portion
  source 1..20: mol_type = other RNA
ccctgctcgtgttacaggcg

SEQ ID NO: 2310 - RNA, 20 nt, synthetic construct
  misc_feature 1..20: note = HBV-targeting guide sequence portion
  source 1..20: mol_type = other RNA
ccctgctggtggctccagtt

SEQ ID NO: 2311 - RNA, 20 nt, synthetic construct
  misc_feature 1..20: note = HBV-targeting guide sequence portion
  source 1..20: mol_type = other RNA
ccctggccagacgccaacaa

SEQ ID NO: 2312 - RNA, 20 nt, synthetic construct
  misc_feature 1..20: note = HBV-targeting guide sequence portion
  source 1..20: mol_type = other RNA
ccctgtcgtcctcttctctg

SEQ ID NO: 2313 - RNA, 20 nt, synthetic construct
  misc_feature 1..20: note = HBV-targeting guide sequence portion
  source 1..20: mol_type = other RNA
ccctgttccgactactgcct

SEQ ID NO: 2314 - RNA, 20 nt, synthetic construct
  misc_feature 1..20: note = HBV-targeting guide sequence portion
  source 1..20: mol_type = other RNA
cccttatccaagggcaagta

SEQ ID NO: 2315 - RNA, 20 nt, synthetic construct
  misc_feature 1..20: note = HBV-targeting guide sequence portion
  source 1..20: mol_type = other RNA
cccttggactcataaggtgg

SEQ ID NO: 2316 - RNA, 20 nt, synthetic construct
  misc_feature 1..20: note = HBV-targeting guide sequence portion
  source 1..20: mol_type = other RNA
cccttggataagggtattaa

SEQ ID NO: 2317 - RNA, 20 nt, synthetic construct
  misc_feature 1..20: note = HBV-targeting guide sequence portion
  source 1..20: mol_type = other RNA
cccttgtatgcatgtattca

SEQ ID NO: 2318 - RNA, 20 nt, synthetic construct
  misc_feature 1..20: note = HBV-targeting guide sequence portion
  source 1..20: mol_type = other RNA
ccctttataccgctgttacc

SEQ ID NO: 2319 - RNA, 20 nt, synthetic construct
  misc_feature 1..20: note = HBV-targeting guide sequence portion
  source 1..20: mol_type = other RNA
cccttttacacaatgtggtt

SEQ ID NO: 2320 - RNA, 20 nt, synthetic construct
  misc_feature 1..20: note = HBV-targeting guide sequence portion
  source 1..20: mol_type = other RNA
ccgaaagcccaggatgatgg

SEQ ID NO: 2321 - RNA, 20 nt, synthetic construct
  misc_feature 1..20: note = HBV-targeting guide sequence portion
  source 1..20: mol_type = other RNA
ccgaaggttttgtacagcaa

SEQ ID NO: 2322 - RNA, 20 nt, synthetic construct
  misc_feature 1..20: note = HBV-targeting guide sequence portion
  source 1..20: mol_type = other RNA
ccgaatgctccagctcctac

SEQ ID NO: 2323 - RNA, 20 nt, synthetic construct
  misc_feature 1..20: note = HBV-targeting guide sequence portion
  source 1..20: mol_type = other RNA
ccgaccaccagttggaccca

SEQ ID NO: 2324 - RNA, 20 nt, synthetic construct
  misc_feature 1..20: note = HBV-targeting guide sequence portion
  source 1..20: mol_type = other RNA
ccgaccacggggcgcacctc

SEQ ID NO: 2325 - RNA, 20 nt, synthetic construct
  misc_feature 1..20: note = HBV-targeting guide sequence portion
  source 1..20: mol_type = other RNA
ccgaccgaccacggggcgca

SEQ ID NO: 2326 - RNA, 20 nt, synthetic construct
  misc_feature 1..20: note = HBV-targeting guide sequence portion
  source 1..20: mol_type = other RNA
ccgaccttgaggcatacttc

SEQ ID NO: 2327 - RNA, 20 nt, synthetic construct
  misc_feature 1..20: note = HBV-targeting guide sequence portion
  source 1..20: mol_type = other RNA
ccgacgggacgtaaacaaag

SEQ ID NO: 2328 - RNA, 20 nt, synthetic construct
  misc_feature 1..20: note = HBV-targeting guide sequence portion
  source 1..20: mol_type = other RNA
ccgactactgcctctcacat

SEQ ID NO: 2329 - RNA, 20 nt, synthetic construct
  misc_feature 1..20: note = HBV-targeting guide sequence portion
  source 1..20: mol_type = other RNA
ccgagaatgtttgctccaga

SEQ ID NO: 2330 - RNA, 20 nt, synthetic construct
  misc_feature 1..20: note = HBV-targeting guide sequence portion
  source 1..20: mol_type = other RNA
ccgagattgagatcttctgc

SEQ ID NO: 2331 - RNA, 20 nt, synthetic construct
  misc_feature 1..20: note = HBV-targeting guide sequence portion
  source 1..20: mol_type = other RNA
ccgatacagagctgcggcgg

SEQ ID NO: 2332 - RNA, 20 nt, synthetic construct
  misc_feature 1..20: note = HBV-targeting guide sequence portion
  source 1..20: mol_type = other RNA
ccgatccatactgcggaact

SEQ ID NO: 2333 - RNA, 20 nt, synthetic construct
  misc_feature 1..20: note = HBV-targeting guide sequence portion
  source 1..20: mol_type = other RNA
ccgcaaatatacatcgttcc

SEQ ID NO: 2334 - RNA, 20 nt, synthetic construct
  misc_feature 1..20: note = HBV-targeting guide sequence portion
  source 1..20: mol_type = other RNA
ccgcacggaggccttttggg

SEQ ID NO: 2335 - RNA, 20 nt, synthetic construct
  misc_feature 1..20: note = HBV-targeting guide sequence portion
  source 1..20: mol_type = other RNA
ccgcagacacatccagcgat

SEQ ID NO: 2336 - RNA, 20 nt, synthetic construct
  misc_feature 1..20: note = HBV-targeting guide sequence portion
  source 1..20: mol_type = other RNA
ccgcagagtctagactcgtg

SEQ ID NO: 2337 - RNA, 20 nt, synthetic construct
  misc_feature 1..20: note = HBV-targeting guide sequence portion
  source 1..20: mol_type = other RNA
ccgcagctctgtatcgggat

SEQ ID NO: 2338 - RNA, 20 nt, synthetic construct
  misc_feature 1..20: note = HBV-targeting guide sequence portion
  source 1..20: mol_type = other RNA
ccgcagtatggatcggcaga

SEQ ID NO: 2339 - RNA, 20 nt, synthetic construct
  misc_feature 1..20: note = HBV-targeting guide sequence portion
  source 1..20: mol_type = other RNA
ccgccgcagctctgtatcgg

SEQ ID NO: 2340 - RNA, 20 nt, synthetic construct
  misc_feature 1..20: note = HBV-targeting guide sequence portion
  source 1..20: mol_type = other RNA
ccgcctcctgcctctaccaa

SEQ ID NO: 2341 - RNA, 20 nt, synthetic construct
  misc_feature 1..20: note = HBV-targeting guide sequence portion
  source 1..20: mol_type = other RNA
ccgcctgtaacacgagcagg

SEQ ID NO: 2342 - RNA, 20 nt, synthetic construct
  misc_feature 1..20: note = HBV-targeting guide sequence portion
  source 1..20: mol_type = other RNA
ccgccttccatagagtgtgt

SEQ ID NO: 2343 - RNA, 20 nt, synthetic construct
  misc_feature 1..20: note = HBV-targeting guide sequence portion
  source 1..20: mol_type = other RNA
ccgcgcaggatccagttggc

SEQ ID NO: 2344 - RNA, 20 nt, synthetic construct
  misc_feature 1..20: note = HBV-targeting guide sequence portion
  source 1..20: mol_type = other RNA
ccgcggacgacccatctcga

SEQ ID NO: 2345 - RNA, 20 nt, synthetic construct
  misc_feature 1..20: note = HBV-targeting guide sequence portion
  source 1..20: mol_type = other RNA
ccgcgggattcagcgccgac

SEQ ID NO: 2346 - RNA, 20 nt, synthetic construct
  misc_feature 1..20: note = HBV-targeting guide sequence portion
  source 1..20: mol_type = other RNA
ccgcgtaaagagaggtgcgc

SEQ ID NO: 2347 - RNA, 20 nt, synthetic construct
  misc_feature 1..20: note = HBV-targeting guide sequence portion
  source 1..20: mol_type = other RNA
ccgcgtcgcagaagatctca

SEQ ID NO: 2348 - RNA, 20 nt, synthetic construct
  misc_feature 1..20: note = HBV-targeting guide sequence portion
  source 1..20: mol_type = other RNA
ccgctgtctccacctctgag

SEQ ID NO: 2349 - RNA, 20 nt, synthetic construct
  misc_feature 1..20: note = HBV-targeting guide sequence portion
  source 1..20: mol_type = other RNA
ccgctgttaccaattttctt

SEQ ID NO: 2350 - RNA, 20 nt, synthetic construct
  misc_feature 1..20: note = HBV-targeting guide sequence portion
  source 1..20: mol_type = other RNA
ccgcttacagttaatgagaa

SEQ ID NO: 2351 - RNA, 20 nt, synthetic construct
  misc_feature 1..20: note = HBV-targeting guide sequence portion
  source 1..20: mol_type = other RNA
ccgcttggggccctgtcgtc

SEQ ID NO: 2352 - RNA, 20 nt, synthetic construct
  misc_feature 1..20: note = HBV-targeting guide sequence portion
  source 1..20: mol_type = other RNA
ccgcttgttttgctcgcagc

SEQ ID NO: 2353 - RNA, 20 nt, synthetic construct
  misc_feature 1..20: note = HBV-targeting guide sequence portion
  source 1..20: mol_type = other RNA
ccggaaaggttccacgcatg

SEQ ID NO: 2354 - RNA, 20 nt, synthetic construct
  misc_feature 1..20: note = HBV-targeting guide sequence portion
  source 1..20: mol_type = other RNA
ccggaagtgttgataggata

SEQ ID NO: 2355 - RNA, 20 nt, synthetic construct
  misc_feature 1..20: note = HBV-targeting guide sequence portion
  source 1..20: mol_type = other RNA
ccggaccgtgtgcacttcgc

SEQ ID NO: 2356 - RNA, 20 nt, synthetic construct
  misc_feature 1..20: note = HBV-targeting guide sequence portion
  source 1..20: mol_type = other RNA
ccggagacttgtgttgttag

SEQ ID NO: 2357 - RNA, 20 nt, synthetic construct
  misc_feature 1..20: note = HBV-targeting guide sequence portion
  source 1..20: mol_type = other RNA
ccggcagatgagaaggcaca

SEQ ID NO: 2358 - RNA, 20 nt, synthetic construct
  misc_feature 1..20: note = HBV-targeting guide sequence portion
  source 1..20: mol_type = other RNA
ccggctcctctgccgatcca

SEQ ID NO: 2359 - RNA, 20 nt, synthetic construct
  misc_feature 1..20: note = HBV-targeting guide sequence portion
  source 1..20: mol_type = other RNA
ccggctgcgagcaaaacaag

SEQ ID NO: 2360 - RNA, 20 nt, synthetic construct
  misc_feature 1..20: note = HBV-targeting guide sequence portion
  source 1..20: mol_type = other RNA
ccgggagttttctgaaacat

SEQ ID NO: 2361 - RNA, 20 nt, synthetic construct
  misc_feature 1..20: note = HBV-targeting guide sequence portion
  source 1..20: mol_type = other RNA
ccggtctggagcaaacattc

SEQ ID NO: 2362 - RNA, 20 nt, synthetic construct
  misc_feature 1..20: note = HBV-targeting guide sequence portion
  source 1..20: mol_type = other RNA
ccggttaacaggcctattga

SEQ ID NO: 2363 - RNA, 20 nt, synthetic construct
  misc_feature 1..20: note = HBV-targeting guide sequence portion
  source 1..20: mol_type = other RNA
ccgtaaaatttcccacctta

SEQ ID NO: 2364 - RNA, 20 nt, synthetic construct
  misc_feature 1..20: note = HBV-targeting guide sequence portion
  source 1..20: mol_type = other RNA
ccgtacgagatcttctagat

SEQ ID NO: 2365 - RNA, 20 nt, synthetic construct
  misc_feature 1..20: note = HBV-targeting guide sequence portion
  source 1..20: mol_type = other RNA
ccgtcctgactggcgattgg

SEQ ID NO: 2366 - RNA, 20 nt, synthetic construct
  misc_feature 1..20: note = HBV-targeting guide sequence portion
  source 1..20: mol_type = other RNA
ccgtcggcgctgaatcccgc

SEQ ID NO: 2367 - RNA, 20 nt, synthetic construct
  misc_feature 1..20: note = HBV-targeting guide sequence portion
  source 1..20: mol_type = other RNA
ccgtctgtcctctaattcca

SEQ ID NO: 2368 - RNA, 20 nt, synthetic construct
  misc_feature 1..20: note = HBV-targeting guide sequence portion
  source 1..20: mol_type = other RNA
ccgtctgtgccttctcatct

SEQ ID NO: 2369 - RNA, 20 nt, synthetic construct
  misc_feature 1..20: note = HBV-targeting guide sequence portion
  source 1..20: mol_type = other RNA
ccgtcttttctcattaactg

SEQ ID NO: 2370 - RNA, 20 nt, synthetic construct
  misc_feature 1..20: note = HBV-targeting guide sequence portion
  source 1..20: mol_type = other RNA
ccgtgaacgcccaccaattc

SEQ ID NO: 2371 - RNA, 20 nt, synthetic construct
  misc_feature 1..20: note = HBV-targeting guide sequence portion
  source 1..20: mol_type = other RNA
ccgtgcggtggggtgaaccc

SEQ ID NO: 2372 - RNA, 20 nt, synthetic construct
  misc_feature 1..20: note = HBV-targeting guide sequence portion
  source 1..20: mol_type = other RNA
ccgtgctggtggttgatgat

SEQ ID NO: 2373 - RNA, 20 nt, synthetic construct
  misc_feature 1..20: note = HBV-targeting guide sequence portion
  source 1..20: mol_type = other RNA
ccgtggtcggtcggaacggc

SEQ ID NO: 2374 - RNA, 20 nt, synthetic construct
  misc_feature 1..20: note = HBV-targeting guide sequence portion
  source 1..20: mol_type = other RNA
ccgtgtgcacttcgcttcac

SEQ ID NO: 2375 - RNA, 20 nt, synthetic construct
  misc_feature 1..20: note = HBV-targeting guide sequence portion
  source 1..20: mol_type = other RNA
ccgtgtgtcttggccaaaat

SEQ ID NO: 2376 - RNA, 20 nt, synthetic construct
  misc_feature 1..20: note = HBV-targeting guide sequence portion
  source 1..20: mol_type = other RNA
ccgttccgaccgaccacggg

SEQ ID NO: 2377 - RNA, 20 nt, synthetic construct
  misc_feature 1..20: note = HBV-targeting guide sequence portion
  source 1..20: mol_type = other RNA
ccgttgccaggcaacggcca

SEQ ID NO: 2378 - RNA, 20 nt, synthetic construct
  misc_feature 1..20: note = HBV-targeting guide sequence portion
  source 1..20: mol_type = other RNA
ccgttgcctggcaacggggt

SEQ ID NO: 2379 - RNA, 20 nt, synthetic construct
  misc_feature 1..20: note = HBV-targeting guide sequence portion
  source 1..20: mol_type = other RNA
ccgtttctcttccaaaagta

SEQ ID NO: 2380 - RNA, 20 nt, synthetic construct
  misc_feature 1..20: note = HBV-targeting guide sequence portion
  source 1..20: mol_type = other RNA
ccgtttctcttggctcagtt

SEQ ID NO: 2381 - RNA, 20 nt, synthetic construct
  misc_feature 1..20: note = HBV-targeting guide sequence portion
  source 1..20: mol_type = other RNA
cctaaagccacccaaggcac

SEQ ID NO: 2382 - RNA, 20 nt, synthetic construct
  misc_feature 1..20: note = HBV-targeting guide sequence portion
  source 1..20: mol_type = other RNA
cctaaagttcagacaactat

SEQ ID NO: 2383 - RNA, 20 nt, synthetic construct
  misc_feature 1..20: note = HBV-targeting guide sequence portion
  source 1..20: mol_type = other RNA
cctaaattcaccaaatactt

SEQ ID NO: 2384 - RNA, 20 nt, synthetic construct
  misc_feature 1..20: note = HBV-targeting guide sequence portion
  source 1..20: mol_type = other RNA
cctaacaaaacaaagagatg

SEQ ID NO: 2385 - RNA, 20 nt, synthetic construct
  misc_feature 1..20: note = HBV-targeting guide sequence portion
  source 1..20: mol_type = other RNA
cctaatatacatctacacca

SEQ ID NO: 2386 - RNA, 20 nt, synthetic construct
  misc_feature 1..20: note = HBV-targeting guide sequence portion
  source 1..20: mol_type = other RNA
cctaatcatctcttgttcat

SEQ ID NO: 2387 - RNA, 20 nt, synthetic construct
  misc_feature 1..20: note = HBV-targeting guide sequence portion
  source 1..20: mol_type = other RNA
cctacaaactgttcacattt

SEQ ID NO: 2388 - RNA, 20 nt, synthetic construct
  misc_feature 1..20: note = HBV-targeting guide sequence portion
  source 1..20: mol_type = other RNA
cctacagcctcctagtacaa

SEQ ID NO: 2389 - RNA, 20 nt, synthetic construct
  misc_feature 1..20: note = HBV-targeting guide sequence portion
  source 1..20: mol_type = other RNA
cctaccccgctgtctccacc

SEQ ID NO: 2390 - RNA, 20 nt, synthetic construct
  misc_feature 1..20: note = HBV-targeting guide sequence portion
  source 1..20: mol_type = other RNA
cctaccttgttggcgtctgg

SEQ ID NO: 2391 - RNA, 20 nt, synthetic construct
  misc_feature 1..20: note = HBV-targeting guide sequence portion
  source 1..20: mol_type = other RNA
cctacgaaccactgaacaaa

SEQ ID NO: 2392 - RNA, 20 nt, synthetic construct
  misc_feature 1..20: note = HBV-targeting guide sequence portion
  source 1..20: mol_type = other RNA
cctactgttcaagcctccaa

SEQ ID NO: 2393 - RNA, 20 nt, synthetic construct
  misc_feature 1..20: note = HBV-targeting guide sequence portion
  source 1..20: mol_type = other RNA
cctagaaaattgagagaagt

SEQ ID NO: 2394 - RNA, 20 nt, synthetic construct
  misc_feature 1..20: note = HBV-targeting guide sequence portion
  source 1..20: mol_type = other RNA
cctagaagaagaactccctc

SEQ ID NO: 2395 - RNA, 20 nt, synthetic construct
  misc_feature 1..20: note = HBV-targeting guide sequence portion
  source 1..20: mol_type = other RNA
cctagagtatttggtgtctt

SEQ ID NO: 2396 - RNA, 20 nt, synthetic construct
  misc_feature 1..20: note = HBV-targeting guide sequence portion
  source 1..20: mol_type = other RNA
cctagatgcttgatcttcta

SEQ ID NO: 2397 - RNA, 20 nt, synthetic construct
  misc_feature 1..20: note = HBV-targeting guide sequence portion
  source 1..20: mol_type = other RNA
cctagcagccatgggaacga

SEQ ID NO: 2398 - RNA, 20 nt, synthetic construct
  misc_feature 1..20: note = HBV-targeting guide sequence portion
  source 1..20: mol_type = other RNA
cctagcaggcataatcaatt

SEQ ID NO: 2399 - RNA, 20 nt, synthetic construct
  misc_feature 1..20: note = HBV-targeting guide sequence portion
  source 1..20: mol_type = other RNA
cctagcccgaatgctccagc

SEQ ID NO: 2400 - RNA, 20 nt, synthetic construct
  misc_feature 1..20: note = HBV-targeting guide sequence portion
  source 1..20: mol_type = other RNA
cctagccgcttgttttgctc

SEQ ID NO: 2401 - RNA, 20 nt, synthetic construct
  misc_feature 1..20: note = HBV-targeting guide sequence portion
  source 1..20: mol_type = other RNA
cctaggaatcctgatgtgat

SEQ ID NO: 2402 - RNA, 20 nt, synthetic construct
  misc_feature 1..20: note = HBV-targeting guide sequence portion
  source 1..20: mol_type = other RNA
cctaggacccctgctcgtgt

SEQ ID NO: 2403 - RNA, 20 nt, synthetic construct
  misc_feature 1..20: note = HBV-targeting guide sequence portion
  source 1..20: mol_type = other RNA
cctagtacaaagatcattaa

SEQ ID NO: 2404 - RNA, 20 nt, synthetic construct
  misc_feature 1..20: note = HBV-targeting guide sequence portion
  source 1..20: mol_type = other RNA
cctagtagtcagttatgtca

SEQ ID NO: 2405 - RNA, 20 nt, synthetic construct
  misc_feature 1..20: note = HBV-targeting guide sequence portion
  source 1..20: mol_type = other RNA
cctatcaacacttccggaga

SEQ ID NO: 2406 - RNA, 20 nt, synthetic construct
  misc_feature 1..20: note = HBV-targeting guide sequence portion
  source 1..20: mol_type = other RNA
cctatcctatcaacacttcc

SEQ ID NO: 2407 - RNA, 20 nt, synthetic construct
  misc_feature 1..20: note = HBV-targeting guide sequence portion
  source 1..20: mol_type = other RNA
cctatgaccaagccccaacc

SEQ ID NO: 2408 - RNA, 20 nt, synthetic construct
  misc_feature 1..20: note = HBV-targeting guide sequence portion
  source 1..20: mol_type = other RNA
cctatgggagtgggcctcag

SEQ ID NO: 2409 - RNA, 20 nt, synthetic construct
  misc_feature 1..20: note = HBV-targeting guide sequence portion
  source 1..20: mol_type = other RNA
cctattgattggaaagtgtg

SEQ ID NO: 2410 - RNA, 20 nt, synthetic construct
  misc_feature 1..20: note = HBV-targeting guide sequence portion
  source 1..20: mol_type = other RNA
cctcaaggtcggtcgttgac

SEQ ID NO: 2411 - RNA, 20 nt, synthetic construct
  misc_feature 1..20: note = HBV-targeting guide sequence portion
  source 1..20: mol_type = other RNA
cctcacaataccgcagagtc

SEQ ID NO: 2412 - RNA, 20 nt, synthetic construct
  misc_feature 1..20: note = HBV-targeting guide sequence portion
  source 1..20: mol_type = other RNA
cctcaccatactgcactcag

SEQ ID NO: 2413 - RNA, 20 nt, synthetic construct
  misc_feature 1..20: note = HBV-targeting guide sequence portion
  source 1..20: mol_type = other RNA
cctcagcccgtttctcttgg

SEQ ID NO: 2414 - RNA, 20 nt, synthetic construct
  misc_feature 1..20: note = HBV-targeting guide sequence portion
  source 1..20: mol_type = other RNA
cctcaggctcagggcataat

SEQ ID NO: 2415 - RNA, 20 nt, synthetic construct
  misc_feature 1..20: note = HBV-targeting guide sequence portion
  source 1..20: mol_type = other RNA
cctcatcttcttgttggttc

SEQ ID NO: 2416 - RNA, 20 nt, synthetic construct
  misc_feature 1..20: note = HBV-targeting guide sequence portion
  source 1..20: mol_type = other RNA
cctcattctgtgggtcacca

SEQ ID NO: 2417 - RNA, 20 nt, synthetic construct
  misc_feature 1..20: note = HBV-targeting guide sequence portion
  source 1..20: mol_type = other RNA
cctcattggaaaacaccctc

SEQ ID NO: 2418 - RNA, 20 nt, synthetic construct
  misc_feature 1..20: note = HBV-targeting guide sequence portion
  source 1..20: mol_type = other RNA
cctccaacttgtcctggtta

SEQ ID NO: 2419 - RNA, 20 nt, synthetic construct
  misc_feature 1..20: note = HBV-targeting guide sequence portion
  source 1..20: mol_type = other RNA
cctccaagctgtgccttggg

SEQ ID NO: 2420 - RNA, 20 nt, synthetic construct
  misc_feature 1..20: note = HBV-targeting guide sequence portion
  source 1..20: mol_type = other RNA
cctccaatcactcaccaacc

SEQ ID NO: 2421 - RNA, 20 nt, synthetic construct
  misc_feature 1..20: note = HBV-targeting guide sequence portion
  source 1..20: mol_type = other RNA
cctccagcttatagaccacc

SEQ ID NO: 2422 - RNA, 20 nt, synthetic construct
  misc_feature 1..20: note = HBV-targeting guide sequence portion
  source 1..20: mol_type = other RNA
cctcccagtctttaaacaaa

SEQ ID NO: 2423 - RNA, 20 nt, synthetic construct
  misc_feature 1..20: note = HBV-targeting guide sequence portion
  source 1..20: mol_type = other RNA
cctcccccaactcctcccag

SEQ ID NO: 2424 - RNA, 20 nt, synthetic construct
  misc_feature 1..20: note = HBV-targeting guide sequence portion
  source 1..20: mol_type = other RNA
cctccgtgcggtggggtgaa

SEQ ID NO: 2425 - RNA, 20 nt, synthetic construct
  misc_feature 1..20: note = HBV-targeting guide sequence portion
  source 1..20: mol_type = other RNA
cctcctagtacaaagatcat

SEQ ID NO: 2426 - RNA, 20 nt, synthetic construct
  misc_feature 1..20: note = HBV-targeting guide sequence portion
  source 1..20: mol_type = other RNA
cctcctgcctctaccaatcg

SEQ ID NO: 2427 - RNA, 20 nt, synthetic construct
  misc_feature 1..20: note = HBV-targeting guide sequence portion
  source 1..20: mol_type = other RNA
cctcctgtcctccaacttgt

SEQ ID NO: 2428 - RNA, 20 nt, synthetic construct
  misc_feature 1..20: note = HBV-targeting guide sequence portion
  source 1..20: mol_type = other RNA
cctcctgttgctgtacaaaa

SEQ ID NO: 2429 - RNA, 20 nt, synthetic construct
  misc_feature 1..20: note = HBV-targeting guide sequence portion
  source 1..20: mol_type = other RNA
cctcgagaagattgacgata

SEQ ID NO: 2430 - RNA, 20 nt, synthetic construct
  misc_feature 1..20: note = HBV-targeting guide sequence portion
  source 1..20: mol_type = other RNA
cctcgagatgggtcgtccgc

SEQ ID NO: 2431 - RNA, 20 nt, synthetic construct
  misc_feature 1..20: note = HBV-targeting guide sequence portion
  source 1..20: mol_type = other RNA
cctcgcagacgaagatctca

SEQ ID NO: 2432 - RNA, 20 nt, synthetic construct
  misc_feature 1..20: note = HBV-targeting guide sequence portion
  source 1..20: mol_type = other RNA
cctcgcctcgcagacgaaga

SEQ ID NO: 2433 - RNA, 20 nt, synthetic construct
  misc_feature 1..20: note = HBV-targeting guide sequence portion
  source 1..20: mol_type = other RNA
cctcgtcgtctaacaacaca

SEQ ID NO: 2434 - RNA, 20 nt, synthetic construct
  misc_feature 1..20: note = HBV-targeting guide sequence portion
  source 1..20: mol_type = other RNA
cctctaattccaggatcatc

SEQ ID NO: 2435 - RNA, 20 nt, synthetic construct
  misc_feature 1..20: note = HBV-targeting guide sequence portion
  source 1..20: mol_type = other RNA
cctctaccaatcgccagtca

SEQ ID NO: 2436 - RNA, 20 nt, synthetic construct
  misc_feature 1..20: note = HBV-targeting guide sequence portion
  source 1..20: mol_type = other RNA
cctctatgtatccctcctgt

SEQ ID NO: 2437 - RNA, 20 nt, synthetic construct
  misc_feature 1..20: note = HBV-targeting guide sequence portion
  source 1..20: mol_type = other RNA
cctctcacatatcgtcaatc

SEQ ID NO: 2438 - RNA, 20 nt, synthetic construct
  misc_feature 1..20: note = HBV-targeting guide sequence portion
  source 1..20: mol_type = other RNA
cctctcactctgggatcttg

SEQ ID NO: 2439 - RNA, 20 nt, synthetic construct
  misc_feature 1..20: note = HBV-targeting guide sequence portion
  source 1..20: mol_type = other RNA
cctctcccgcaaatatacat

SEQ ID NO: 2440 - RNA, 20 nt, synthetic construct
  misc_feature 1..20: note = HBV-targeting guide sequence portion
  source 1..20: mol_type = other RNA
cctctctttacgcggactcc

SEQ ID NO: 2441 - RNA, 20 nt, synthetic construct
  misc_feature 1..20: note = HBV-targeting guide sequence portion
  source 1..20: mol_type = other RNA
cctctgagaaacactcatcc

SEQ ID NO: 2442 - RNA, 20 nt, synthetic construct
  misc_feature 1..20: note = HBV-targeting guide sequence portion
  source 1..20: mol_type = other RNA
cctctgcacgtcgcatggag

SEQ ID NO: 2443 - RNA, 20 nt, synthetic construct
  misc_feature 1..20: note = HBV-targeting guide sequence portion
  source 1..20: mol_type = other RNA
cctctgccgatccatactgc

SEQ ID NO: 2444 - RNA, 20 nt, synthetic construct
  misc_feature 1..20: note = HBV-targeting guide sequence portion
  source 1..20: mol_type = other RNA
cctctgcctaatcatctctt

SEQ ID NO: 2445 - RNA, 20 nt, synthetic construct
  misc_feature 1..20: note = HBV-targeting guide sequence portion
  source 1..20: mol_type = other RNA
cctctgggattctttcccga

SEQ ID NO: 2446 - RNA, 20 nt, synthetic construct
  misc_feature 1..20: note = HBV-targeting guide sequence portion
  source 1..20: mol_type = other RNA
cctcttatgtaagaccttgg

SEQ ID NO: 2447 - RNA, 20 nt, synthetic construct
  misc_feature 1..20: note = HBV-targeting guide sequence portion
  source 1..20: mol_type = other RNA
cctcttcatcctgctgctat

SEQ ID NO: 2448 - RNA, 20 nt, synthetic construct
  misc_feature 1..20: note = HBV-targeting guide sequence portion
  source 1..20: mol_type = other RNA
cctcttctctgcctgccgtt

SEQ ID NO: 2449 - RNA, 20 nt, synthetic construct
  misc_feature 1..20: note = HBV-targeting guide sequence portion
  source 1..20: mol_type = other RNA
cctcttttcctaatatacat

SEQ ID NO: 2450 - RNA, 20 nt, synthetic construct
  misc_feature 1..20: note = HBV-targeting guide sequence portion
  source 1..20: mol_type = other RNA
cctgaacctttaccccgttg

SEQ ID NO: 2451 - RNA, 20 nt, synthetic construct
  misc_feature 1..20: note = HBV-targeting guide sequence portion
  source 1..20: mol_type = other RNA
cctgaactggagccaccagc

SEQ ID NO: 2452 - RNA, 20 nt, synthetic construct
  misc_feature 1..20: note = HBV-targeting guide sequence portion
  source 1..20: mol_type = other RNA
cctgactggcgattggtaga

SEQ ID NO: 2453 - RNA, 20 nt, synthetic construct
  misc_feature 1..20: note = HBV-targeting guide sequence portion
  source 1..20: mol_type = other RNA
cctgagcattgttcacctca

SEQ ID NO: 2454 - RNA, 20 nt, synthetic construct
  misc_feature 1..20: note = HBV-targeting guide sequence portion
  source 1..20: mol_type = other RNA
cctgagcctgagggctccac

SEQ ID NO: 2455 - RNA, 20 nt, synthetic construct
  misc_feature 1..20: note = HBV-targeting guide sequence portion
  source 1..20: mol_type = other RNA
cctgaggatgagtgtttctc

SEQ ID NO: 2456 - RNA, 20 nt, synthetic construct
  misc_feature 1..20: note = HBV-targeting guide sequence portion
  source 1..20: mol_type = other RNA
cctgagggctccaccccaaa

SEQ ID NO: 2457 - RNA, 20 nt, synthetic construct
  misc_feature 1..20: note = HBV-targeting guide sequence portion
  source 1..20: mol_type = other RNA
cctgagtgcagtatggtgag

SEQ ID NO: 2458 - RNA, 20 nt, synthetic construct
  misc_feature 1..20: note = HBV-targeting guide sequence portion
  source 1..20: mol_type = other RNA
cctgatgtgatgttctccat

SEQ ID NO: 2459 - RNA, 20 nt, synthetic construct
  misc_feature 1..20: note = HBV-targeting guide sequence portion
  source 1..20: mol_type = other RNA
cctgcacgactcctgctcaa

SEQ ID NO: 2460 - RNA, 20 nt, synthetic construct
  misc_feature 1..20: note = HBV-targeting guide sequence portion
  source 1..20: mol_type = other RNA
cctgcagaacctgcacgact

SEQ ID NO: 2461 - RNA, 20 nt, synthetic construct
  misc_feature 1..20: note = HBV-targeting guide sequence portion
  source 1..20: mol_type = other RNA
cctgccgttccgaccgacca

SEQ ID NO: 2462 - RNA, 20 nt, synthetic construct
  misc_feature 1..20: note = HBV-targeting guide sequence portion
  source 1..20: mol_type = other RNA
cctgcctcgtcgtctaacaa

SEQ ID NO: 2463 - RNA, 20 nt, synthetic construct
  misc_feature 1..20: note = HBV-targeting guide sequence portion
  source 1..20: mol_type = other RNA
cctgcctctaccaatcgcca

SEQ ID NO: 2464 - RNA, 20 nt, synthetic construct
  misc_feature 1..20: note = HBV-targeting guide sequence portion
  source 1..20: mol_type = other RNA
cctgcgcgggacgtcctttg

SEQ ID NO: 2465 - RNA, 20 nt, synthetic construct
  misc_feature 1..20: note = HBV-targeting guide sequence portion
  source 1..20: mol_type = other RNA
cctgcgctgaacatggagaa

SEQ ID NO: 2466 - RNA, 20 nt, synthetic construct
  misc_feature 1..20: note = HBV-targeting guide sequence portion
  source 1..20: mol_type = other RNA
cctgctaggttttatcctaa

SEQ ID NO: 2467 - RNA, 20 nt, synthetic construct
  misc_feature 1..20: note = HBV-targeting guide sequence portion
  source 1..20: mol_type = other RNA
cctgctcaaggaacctctat

SEQ ID NO: 2468 - RNA, 20 nt, synthetic construct
  misc_feature 1..20: note = HBV-targeting guide sequence portion
  source 1..20: mol_type = other RNA
cctgctcgtgttacaggcgg

SEQ ID NO: 2469 - RNA, 20 nt, synthetic construct
  misc_feature 1..20: note = HBV-targeting guide sequence portion
  source 1..20: mol_type = other RNA
cctgctgctatgcctcatct

SEQ ID NO: 2470 - RNA, 20 nt, synthetic construct
  misc_feature 1..20: note = HBV-targeting guide sequence portion
  source 1..20: mol_type = other RNA
cctgctggtggctccagttc

SEQ ID NO: 2471 - RNA, 20 nt, synthetic construct
  misc_feature 1..20: note = HBV-targeting guide sequence portion
  source 1..20: mol_type = other RNA
cctgcttagattgaatacat

SEQ ID NO: 2472 - RNA, 20 nt, synthetic construct
  misc_feature 1..20: note = HBV-targeting guide sequence portion
  source 1..20: mol_type = other RNA
cctgctttaatgcccttgta

SEQ ID NO: 2473 - RNA, 20 nt, synthetic construct
  misc_feature 1..20: note = HBV-targeting guide sequence portion
  source 1..20: mol_type = other RNA
cctggaattagaggacagac

SEQ ID NO: 2474 - RNA, 20 nt, synthetic construct
  misc_feature 1..20: note = HBV-targeting guide sequence portion
  source 1..20: mol_type = other RNA
cctggcaacggggtaaaggt

SEQ ID NO: 2475 - RNA, 20 nt, synthetic construct
  misc_feature 1..20: note = HBV-targeting guide sequence portion
  source 1..20: mol_type = other RNA
cctggccagacgccaacaag

SEQ ID NO: 2476 - RNA, 20 nt, synthetic construct
  misc_feature 1..20: note = HBV-targeting guide sequence portion
  source 1..20: mol_type = other RNA
cctggccgttgcctggcaac

SEQ ID NO: 2477 - RNA, 20 nt, synthetic construct
  misc_feature 1..20: note = HBV-targeting guide sequence portion
  source 1..20: mol_type = other RNA
cctgggctttcggaaaattc

SEQ ID NO: 2478 - RNA, 20 nt, synthetic construct
  misc_feature 1..20: note = HBV-targeting guide sequence portion
  source 1..20: mol_type = other RNA
cctgggtgggtactaattta

SEQ ID NO: 2479 - RNA, 20 nt, synthetic construct
  misc_feature 1..20: note = HBV-targeting guide sequence portion
  source 1..20: mol_type = other RNA
cctggttatcgctggatgtg

SEQ ID NO: 2480 - RNA, 20 nt, synthetic construct
  misc_feature 1..20: note = HBV-targeting guide sequence portion
  source 1..20: mol_type = other RNA
cctgtaacacgagcaggggt

SEQ ID NO: 2481 - RNA, 20 nt, synthetic construct
  misc_feature 1..20: note = HBV-targeting guide sequence portion
  source 1..20: mol_type = other RNA
cctgtatctccctgctggtg

SEQ ID NO: 2482 - RNA, 20 nt, synthetic construct
  misc_feature 1..20: note = HBV-targeting guide sequence portion
  source 1..20: mol_type = other RNA
cctgtattcccatcccatca

SEQ ID NO: 2483 - RNA, 20 nt, synthetic construct
  misc_feature 1..20: note = HBV-targeting guide sequence portion
  source 1..20: mol_type = other RNA
cctgtcctccaacttgtcct

SEQ ID NO: 2484 - RNA, 20 nt, synthetic construct
  misc_feature 1..20: note = HBV-targeting guide sequence portion
  source 1..20: mol_type = other RNA
cctgtcgtcctcttctctgc

SEQ ID NO: 2485 - RNA, 20 nt, synthetic construct
  misc_feature 1..20: note = HBV-targeting guide sequence portion
  source 1..20: mol_type = other RNA
cctgtctttaaccctcattg

SEQ ID NO: 2486 - RNA, 20 nt, synthetic construct
  misc_feature 1..20: note = HBV-targeting guide sequence portion
  source 1..20: mol_type = other RNA
cctgttaaccgggagttttc

SEQ ID NO: 2487 - RNA, 20 nt, synthetic construct
  misc_feature 1..20: note = HBV-targeting guide sequence portion
  source 1..20: mol_type = other RNA
cctgttccgactactgcctc

SEQ ID NO: 2488 - RNA, 20 nt, synthetic construct
  misc_feature 1..20: note = HBV-targeting guide sequence portion
  source 1..20: mol_type = other RNA
cctgttgctgtacaaaacct

SEQ ID NO: 2489 - RNA, 20 nt, synthetic construct
  misc_feature 1..20: note = HBV-targeting guide sequence portion
  source 1..20: mol_type = other RNA
ccttatccaagggcaagtat

SEQ ID NO: 2490 - RNA, 20 nt, synthetic construct
  misc_feature 1..20: note = HBV-targeting guide sequence portion
  source 1..20: mol_type = other RNA
ccttatgagtccaagggata

SEQ ID NO: 2491 - RNA, 20 nt, synthetic construct
  misc_feature 1..20: note = HBV-targeting guide sequence portion
  source 1..20: mol_type = other RNA
ccttattatccagaacatct

SEQ ID NO: 2492 - RNA, 20 nt, synthetic construct
  misc_feature 1..20: note = HBV-targeting guide sequence portion
  source 1..20: mol_type = other RNA
ccttcagagcaaactccaac

SEQ ID NO: 2493 - RNA, 20 nt, synthetic construct
  misc_feature 1..20: note = HBV-targeting guide sequence portion
  source 1..20: mol_type = other RNA
ccttccaccaaactctgcaa

SEQ ID NO: 2494 - RNA, 20 nt, synthetic construct
  misc_feature 1..20: note = HBV-targeting guide sequence portion
  source 1..20: mol_type = other RNA
ccttccatagagtgtgtaaa

SEQ ID NO: 2495 - RNA, 20 nt, synthetic construct
  misc_feature 1..20: note = HBV-targeting guide sequence portion
  source 1..20: mol_type = other RNA
ccttccgtacgagatcttct

SEQ ID NO: 2496 - RNA, 20 nt, synthetic construct
  misc_feature 1..20: note = HBV-targeting guide sequence portion
  source 1..20: mol_type = other RNA
ccttcggatggaaactgcac

SEQ ID NO: 2497 - RNA, 20 nt, synthetic construct
  misc_feature 1..20: note = HBV-targeting guide sequence portion
  source 1..20: mol_type = other RNA
ccttctcatctgccggaccg

SEQ ID NO: 2498 - RNA, 20 nt, synthetic construct
  misc_feature 1..20: note = HBV-targeting guide sequence portion
  source 1..20: mol_type = other RNA
ccttctgacttctttccttc

SEQ ID NO: 2499 - RNA, 20 nt, synthetic construct
  misc_feature 1..20: note = HBV-targeting guide sequence portion
  source 1..20: mol_type = other RNA
ccttgagcaggagtcgtgca

SEQ ID NO: 2500 - RNA, 20 nt, synthetic construct
  misc_feature 1..20: note = HBV-targeting guide sequence portion
  source 1..20: mol_type = other RNA
ccttgaggcatacttcaaag

SEQ ID NO: 2501 - RNA, 20 nt, synthetic construct
  misc_feature 1..20: note = HBV-targeting guide sequence portion
  source 1..20: mol_type = other RNA
ccttgatagtccagaagaac

SEQ ID NO: 2502 - RNA, 20 nt, synthetic construct
  misc_feature 1..20: note = HBV-targeting guide sequence portion
  source 1..20: mol_type = other RNA
ccttgccagcaaatccgcct

SEQ ID NO: 2503 - RNA, 20 nt, synthetic construct
  misc_feature 1..20: note = HBV-targeting guide sequence portion
  source 1..20: mol_type = other RNA
ccttggactcataaggtggg

SEQ ID NO: 2504 - RNA, 20 nt, synthetic construct
  misc_feature 1..20: note = HBV-targeting guide sequence portion
  source 1..20: mol_type = other RNA
ccttggagtctcctgagcat

SEQ ID NO: 2505 - RNA, 20 nt, synthetic construct
  misc_feature 1..20: note = HBV-targeting guide sequence portion
  source 1..20: mol_type = other RNA
ccttggataagggtattaaa

SEQ ID NO: 2506 - RNA, 20 nt, synthetic construct
  misc_feature 1..20: note = HBV-targeting guide sequence portion
  source 1..20: mol_type = other RNA
ccttgggcaagaattggtgg

SEQ ID NO: 2507 - RNA, 20 nt, synthetic construct
  misc_feature 1..20: note = HBV-targeting guide sequence portion
  source 1..20: mol_type = other RNA
ccttgggtggctttagggca

SEQ ID NO: 2508 - RNA, 20 nt, synthetic construct
  misc_feature 1..20: note = HBV-targeting guide sequence portion
  source 1..20: mol_type = other RNA
ccttgtaagttggcgaaaaa

SEQ ID NO: 2509 - RNA, 20 nt, synthetic construct
  misc_feature 1..20: note = HBV-targeting guide sequence portion
  source 1..20: mol_type = other RNA
ccttgtatgcatgtattcaa

SEQ ID NO: 2510 - RNA, 20 nt, synthetic construct
  misc_feature 1..20: note = HBV-targeting guide sequence portion
  source 1..20: mol_type = other RNA
ccttgttgacaagaatcctc

SEQ ID NO: 2511 - RNA, 20 nt, synthetic construct
  misc_feature 1..20: note = HBV-targeting guide sequence portion
  source 1..20: mol_type = other RNA
ccttgttggcgtctggccag

SEQ ID NO: 2512 - RNA, 20 nt, synthetic construct
  misc_feature 1..20: note = HBV-targeting guide sequence portion
  source 1..20: mol_type = other RNA
ccttgttgggattgaagtcc

SEQ ID NO: 2513 - RNA, 20 nt, synthetic construct
  misc_feature 1..20: note = HBV-targeting guide sequence portion
  source 1..20: mol_type = other RNA
cctttaccccgttgccaggc

SEQ ID NO: 2514 - RNA, 20 nt, synthetic construct
  misc_feature 1..20: note = HBV-targeting guide sequence portion
  source 1..20: mol_type = other RNA
cctttataccgctgttacca

SEQ ID NO: 2515 - RNA, 20 nt, synthetic construct
  misc_feature 1..20: note = HBV-targeting guide sequence portion
  source 1..20: mol_type = other RNA
cctttccggctcctctgccg

SEQ ID NO: 2516 - RNA, 20 nt, synthetic construct
  misc_feature 1..20: note = HBV-targeting guide sequence portion
  source 1..20: mol_type = other RNA
cctttctgtgtaaacaatac

SEQ ID NO: 2517 - RNA, 20 nt, synthetic construct
  misc_feature 1..20: note = HBV-targeting guide sequence portion
  source 1..20: mol_type = other RNA
cctttgtttacgtcccgtcg

SEQ ID NO: 2518 - RNA, 20 nt, synthetic construct
  misc_feature 1..20: note = HBV-targeting guide sequence portion
  source 1..20: mol_type = other RNA
ccttttacacaatgtggtta

SEQ ID NO: 2519 - RNA, 20 nt, synthetic construct
  misc_feature 1..20: note = HBV-targeting guide sequence portion
  source 1..20: mol_type = other RNA
ccttttggggtggagccctc

SEQ ID NO: 2520 - RNA, 20 nt, synthetic construct
  misc_feature 1..20: note = HBV-targeting guide sequence portion
  source 1..20: mol_type = other RNA
cgaaaaagtgaaagcctgct

SEQ ID NO: 2521 - RNA, 20 nt, synthetic construct
  misc_feature 1..20: note = HBV-targeting guide sequence portion
  source 1..20: mol_type = other RNA
cgaaagcccaggatgatggg

SEQ ID NO: 2522 - RNA, 20 nt, synthetic construct
  misc_feature 1..20: note = HBV-targeting guide sequence portion
  source 1..20: mol_type = other RNA
cgaaccactgaacaaatggc

SEQ ID NO: 2523 - RNA, 20 nt, synthetic construct
  misc_feature 1..20: note = HBV-targeting guide sequence portion
  source 1..20: mol_type = other RNA
cgaagatctcaatcgccgcg

SEQ ID NO: 2524 - RNA, 20 nt, synthetic construct
  misc_feature 1..20: note = HBV-targeting guide sequence portion
  source 1..20: mol_type = other RNA
cgaaggttttgtacagcaac

SEQ ID NO: 2525 - RNA, 20 nt, synthetic construct
  misc_feature 1..20: note = HBV-targeting guide sequence portion
  source 1..20: mol_type = other RNA
cgaagtgcacacggtccggc

SEQ ID NO: 2526 - RNA, 20 nt, synthetic construct
  misc_feature 1..20: note = HBV-targeting guide sequence portion
  source 1..20: mol_type = other RNA
cgaatccacactccaaaaga

SEQ ID NO: 2527 - RNA, 20 nt, synthetic construct
  misc_feature 1..20: note = HBV-targeting guide sequence portion
  source 1..20: mol_type = other RNA
cgaatgctccagctcctacc

SEQ ID NO: 2528 - RNA, 20 nt, synthetic construct
  misc_feature 1..20: note = HBV-targeting guide sequence portion
  source 1..20: mol_type = other RNA
cgaattgtgggtcttctggg

SEQ ID NO: 2529 - RNA, 20 nt, synthetic construct
  misc_feature 1..20: note = HBV-targeting guide sequence portion
  source 1..20: mol_type = other RNA
cgaattttggccaagacaca

SEQ ID NO: 2530 - RNA, 20 nt, synthetic construct
  misc_feature 1..20: note = HBV-targeting guide sequence portion
  source 1..20: mol_type = other RNA
cgacagggccccaagcggcc

SEQ ID NO: 2531 - RNA, 20 nt, synthetic construct
  misc_feature 1..20: note = HBV-targeting guide sequence portion
  source 1..20: mol_type = other RNA
cgaccaccagttggacccag

SEQ ID NO: 2532 - RNA, 20 nt, synthetic construct
  misc_feature 1..20: note = HBV-targeting guide sequence portion
  source 1..20: mol_type = other RNA
cgaccacggggcgcacctct

SEQ ID NO: 2533 - RNA, 20 nt, synthetic construct
  misc_feature 1..20: note = HBV-targeting guide sequence portion
  source 1..20: mol_type = other RNA
cgacccatctcgaggccgct

SEQ ID NO: 2534 - RNA, 20 nt, synthetic construct
  misc_feature 1..20: note = HBV-targeting guide sequence portion
  source 1..20: mol_type = other RNA
cgaccgaccacggggcgcac

SEQ ID NO: 2535 - RNA, 20 nt, synthetic construct
  misc_feature 1..20: note = HBV-targeting guide sequence portion
  source 1..20: mol_type = other RNA
cgaccgaccttgaggcatac

SEQ ID NO: 2536 - RNA, 20 nt, synthetic construct
  misc_feature 1..20: note = HBV-targeting guide sequence portion
  source 1..20: mol_type = other RNA
cgaccttgaggcatacttca

SEQ ID NO: 2537 - RNA, 20 nt, synthetic construct
  misc_feature 1..20: note = HBV-targeting guide sequence portion
  source 1..20: mol_type = other RNA
cgacgaggcaggtcccctag

SEQ ID NO: 2538 - RNA, 20 nt, synthetic construct
  misc_feature 1..20: note = HBV-targeting guide sequence portion
  source 1..20: mol_type = other RNA
cgacgcggcgattgagatct

SEQ ID NO: 2539 - RNA, 20 nt, synthetic construct
  misc_feature 1..20: note = HBV-targeting guide sequence portion
  source 1..20: mol_type = other RNA
cgacgggacgtaaacaaagg

SEQ ID NO: 2540 - RNA, 20 nt, synthetic construct
  misc_feature 1..20: note = HBV-targeting guide sequence portion
  source 1..20: mol_type = other RNA
cgacgtgcagaggtgaagcg

SEQ ID NO: 2541 - RNA, 20 nt, synthetic construct
  misc_feature 1..20: note = HBV-targeting guide sequence portion
  source 1..20: mol_type = other RNA
cgactactgcctctcacata

SEQ ID NO: 2542 - RNA, 20 nt, synthetic construct
  misc_feature 1..20: note = HBV-targeting guide sequence portion
  source 1..20: mol_type = other RNA
cgactcctgctcaaggaacc

SEQ ID NO: 2543 - RNA, 20 nt, synthetic construct
  misc_feature 1..20: note = HBV-targeting guide sequence portion
  source 1..20: mol_type = other RNA
cgagaagattgacgatatgt

SEQ ID NO: 2544 - RNA, 20 nt, synthetic construct
  misc_feature 1..20: note = HBV-targeting guide sequence portion
  source 1..20: mol_type = other RNA
cgagaatgtttgctccagac

SEQ ID NO: 2545 - RNA, 20 nt, synthetic construct
  misc_feature 1..20: note = HBV-targeting guide sequence portion
  source 1..20: mol_type = other RNA
cgagagtaactccacagtag

SEQ ID NO: 2546 - RNA, 20 nt, synthetic construct
  misc_feature 1..20: note = HBV-targeting guide sequence portion
  source 1..20: mol_type = other RNA
cgagatcttctagataccgc

SEQ ID NO: 2547 - RNA, 20 nt, synthetic construct
  misc_feature 1..20: note = HBV-targeting guide sequence portion
  source 1..20: mol_type = other RNA
cgagatgggtcgtccgcggg

SEQ ID NO: 2548 - RNA, 20 nt, synthetic construct
  misc_feature 1..20: note = HBV-targeting guide sequence portion
  source 1..20: mol_type = other RNA
cgagattgagatcttctgcg

SEQ ID NO: 2549 - RNA, 20 nt, synthetic construct
  misc_feature 1..20: note = HBV-targeting guide sequence portion
  source 1..20: mol_type = other RNA
cgagcaaaacaagcggctag

SEQ ID NO: 2550 - RNA, 20 nt, synthetic construct
  misc_feature 1..20: note = HBV-targeting guide sequence portion
  source 1..20: mol_type = other RNA
cgagcaggggtcctaggaat

SEQ ID NO: 2551 - RNA, 20 nt, synthetic construct
  misc_feature 1..20: note = HBV-targeting guide sequence portion
  source 1..20: mol_type = other RNA
cgaggattggggaccctgcg

SEQ ID NO: 2552 - RNA, 20 nt, synthetic construct
  misc_feature 1..20: note = HBV-targeting guide sequence portion
  source 1..20: mol_type = other RNA
cgaggcaggtcccctagaag

SEQ ID NO: 2553 - RNA, 20 nt, synthetic construct
  misc_feature 1..20: note = HBV-targeting guide sequence portion
  source 1..20: mol_type = other RNA
cgaggccgcttggggccctg

SEQ ID NO: 2554 - RNA, 20 nt, synthetic construct
  misc_feature 1..20: note = HBV-targeting guide sequence portion
  source 1..20: mol_type = other RNA
cgaggcgagggagttcttct

SEQ ID NO: 2555 - RNA, 20 nt, synthetic construct
  misc_feature 1..20: note = HBV-targeting guide sequence portion
  source 1..20: mol_type = other RNA
cgagggagttcttcttctag

SEQ ID NO: 2556 - RNA, 20 nt, synthetic construct
  misc_feature 1..20: note = HBV-targeting guide sequence portion
  source 1..20: mol_type = other RNA
cgagtctagactctgcggta

SEQ ID NO: 2557 - RNA, 20 nt, synthetic construct
  misc_feature 1..20: note = HBV-targeting guide sequence portion
  source 1..20: mol_type = other RNA
cgataaccaggacaagttgg

SEQ ID NO: 2558 - RNA, 20 nt, synthetic construct
  misc_feature 1..20: note = HBV-targeting guide sequence portion
  source 1..20: mol_type = other RNA
cgatacagagctgcggcggt

SEQ ID NO: 2559 - RNA, 20 nt, synthetic construct
  misc_feature 1..20: note = HBV-targeting guide sequence portion
  source 1..20: mol_type = other RNA
cgatatgtgagaggcagtag

SEQ ID NO: 2560 - RNA, 20 nt, synthetic construct
  misc_feature 1..20: note = HBV-targeting guide sequence portion
  source 1..20: mol_type = other RNA
cgatccatactgcggaactc

SEQ ID NO: 2561 - RNA, 20 nt, synthetic construct
  misc_feature 1..20: note = HBV-targeting guide sequence portion
  source 1..20: mol_type = other RNA
cgatgtatatttgcgggaga

SEQ ID NO: 2562 - RNA, 20 nt, synthetic construct
  misc_feature 1..20: note = HBV-targeting guide sequence portion
  source 1..20: mol_type = other RNA
cgattgagatcttcgtctgc

SEQ ID NO: 2563 - RNA, 20 nt, synthetic construct
  misc_feature 1..20: note = HBV-targeting guide sequence portion
  source 1..20: mol_type = other RNA
cgattggtagaggcaggagg

SEQ ID NO: 2564 - RNA, 20 nt, synthetic construct
  misc_feature 1..20: note = HBV-targeting guide sequence portion
  source 1..20: mol_type = other RNA
cgcaaatatacatcgttccc

SEQ ID NO: 2565 - RNA, 20 nt, synthetic construct
  misc_feature 1..20: note = HBV-targeting guide sequence portion
  source 1..20: mol_type = other RNA
cgcaccagcaccatgcaact

SEQ ID NO: 2566 - RNA, 20 nt, synthetic construct
  misc_feature 1..20: note = HBV-targeting guide sequence portion
  source 1..20: mol_type = other RNA
cgcacctctctttacgcgga

SEQ ID NO: 2567 - RNA, 20 nt, synthetic construct
  misc_feature 1..20: note = HBV-targeting guide sequence portion
  source 1..20: mol_type = other RNA
cgcacggaggccttttgggg

SEQ ID NO: 2568 - RNA, 20 nt, synthetic construct
  misc_feature 1..20: note = HBV-targeting guide sequence portion
  source 1..20: mol_type = other RNA
cgcactcctccagcttatag

SEQ ID NO: 2569 - RNA, 20 nt, synthetic construct
  misc_feature 1..20: note = HBV-targeting guide sequence portion
  source 1..20: mol_type = other RNA
cgcagaagatctcaatctcg

SEQ ID NO: 2570 - RNA, 20 nt, synthetic construct
  misc_feature 1..20: note = HBV-targeting guide sequence portion
  source 1..20: mol_type = other RNA
cgcagacacatccagcgata

SEQ ID NO: 2571 - RNA, 20 nt, synthetic construct
  misc_feature 1..20: note = HBV-targeting guide sequence portion
  source 1..20: mol_type = other RNA
cgcagaccaatttatgccta

SEQ ID NO: 2572 - RNA, 20 nt, synthetic construct
  misc_feature 1..20: note = HBV-targeting guide sequence portion
  source 1..20: mol_type = other RNA
cgcagacgaagatctcaatc

SEQ ID NO: 2573 - RNA, 20 nt, synthetic construct
  misc_feature 1..20: note = HBV-targeting guide sequence portion
  source 1..20: mol_type = other RNA
cgcagagtctagactcgtgg

SEQ ID NO: 2574 - RNA, 20 nt, synthetic construct
  misc_feature 1..20: note = HBV-targeting guide sequence portion
  source 1..20: mol_type = other RNA
cgcagccggtctggagcaaa

SEQ ID NO: 2575 - RNA, 20 nt, synthetic construct
  misc_feature 1..20: note = HBV-targeting guide sequence portion
  source 1..20: mol_type = other RNA
cgcagctctgtatcgggatg

SEQ ID NO: 2576 - RNA, 20 nt, synthetic construct
  misc_feature 1..20: note = HBV-targeting guide sequence portion
  source 1..20: mol_type = other RNA
cgcaggatccagttggcagc

SEQ ID NO: 2577 - RNA, 20 nt, synthetic construct
  misc_feature 1..20: note = HBV-targeting guide sequence portion
  source 1..20: mol_type = other RNA
cgcagggtccccaatcctcg

SEQ ID NO: 2578 - RNA, 20 nt, synthetic construct
  misc_feature 1..20: note = HBV-targeting guide sequence portion
  source 1..20: mol_type = other RNA
cgcagtatggatcggcagag

SEQ ID NO: 2579 - RNA, 20 nt, synthetic construct
  misc_feature 1..20: note = HBV-targeting guide sequence portion
  source 1..20: mol_type = other RNA
cgcagtccccaacctccaat

SEQ ID NO: 2580 - RNA, 20 nt, synthetic construct
  misc_feature 1..20: note = HBV-targeting guide sequence portion
  source 1..20: mol_type = other RNA
cgcatgcgctgatggcctat

SEQ ID NO: 2581 - RNA, 20 nt, synthetic construct
  misc_feature 1..20: note = HBV-targeting guide sequence portion
  source 1..20: mol_type = other RNA
cgcatgcgtggaacctttcc

SEQ ID NO: 2582 - RNA, 20 nt, synthetic construct
  misc_feature 1..20: note = HBV-targeting guide sequence portion
  source 1..20: mol_type = other RNA
cgcatggagaccaccgtgaa

SEQ ID NO: 2583 - RNA, 20 nt, synthetic construct
  misc_feature 1..20: note = HBV-targeting guide sequence portion
  source 1..20: mol_type = other RNA
cgccaacaaggtaggagctg

SEQ ID NO: 2584 - RNA, 20 nt, synthetic construct
  misc_feature 1..20: note = HBV-targeting guide sequence portion
  source 1..20: mol_type = other RNA
cgccaacttacaaggccttt

SEQ ID NO: 2585 - RNA, 20 nt, synthetic construct
  misc_feature 1..20: note = HBV-targeting guide sequence portion
  source 1..20: mol_type = other RNA
cgccagtcaggacggcagcc

SEQ ID NO: 2586 - RNA, 20 nt, synthetic construct
  misc_feature 1..20: note = HBV-targeting guide sequence portion
  source 1..20: mol_type = other RNA
cgcccaccaattcttgccca

SEQ ID NO: 2587 - RNA, 20 nt, synthetic construct
  misc_feature 1..20: note = HBV-targeting guide sequence portion
  source 1..20: mol_type = other RNA
cgccccgtggtcggtcggaa

SEQ ID NO: 2588 - RNA, 20 nt, synthetic construct
  misc_feature 1..20: note = HBV-targeting guide sequence portion
  source 1..20: mol_type = other RNA
cgccgacgggacgtaaacaa

SEQ ID NO: 2589 - RNA, 20 nt, synthetic construct
  misc_feature 1..20: note = HBV-targeting guide sequence portion
  source 1..20: mol_type = other RNA
cgccgcagacacatccagcg

SEQ ID NO: 2590 - RNA, 20 nt, synthetic construct
  misc_feature 1..20: note = HBV-targeting guide sequence portion
  source 1..20: mol_type = other RNA
cgccgcagctctgtatcggg

SEQ ID NO: 2591 - RNA, 20 nt, synthetic construct
  misc_feature 1..20: note = HBV-targeting guide sequence portion
  source 1..20: mol_type = other RNA
cgccgcgtcgcagaagatct

SEQ ID NO: 2592 - RNA, 20 nt, synthetic construct
  misc_feature 1..20: note = HBV-targeting guide sequence portion
  source 1..20: mol_type = other RNA
cgcctcattctgtgggtcac

SEQ ID NO: 2593 - RNA, 20 nt, synthetic construct
  misc_feature 1..20: note = HBV-targeting guide sequence portion
  source 1..20: mol_type = other RNA
cgcctcctgcctctaccaat

SEQ ID NO: 2594 - RNA, 20 nt, synthetic construct
  misc_feature 1..20: note = HBV-targeting guide sequence portion
  source 1..20: mol_type = other RNA
cgcctcgcagacgaagatct

SEQ ID NO: 2595 - RNA, 20 nt, synthetic construct
  misc_feature 1..20: note = HBV-targeting guide sequence portion
  source 1..20: mol_type = other RNA
cgcctgtaacacgagcaggg

SEQ ID NO: 2596 - RNA, 20 nt, synthetic construct
  misc_feature 1..20: note = HBV-targeting guide sequence portion
  source 1..20: mol_type = other RNA
cgccttccatagagtgtgta

SEQ ID NO: 2597 - RNA, 20 nt, synthetic construct
  misc_feature 1..20: note = HBV-targeting guide sequence portion
  source 1..20: mol_type = other RNA
cgcgcaggatccagttggca

SEQ ID NO: 2598 - RNA, 20 nt, synthetic construct
  misc_feature 1..20: note = HBV-targeting guide sequence portion
  source 1..20: mol_type = other RNA
cgcggacgacccatctcgag

SEQ ID NO: 2599 - RNA, 20 nt, synthetic construct
  misc_feature 1..20: note = HBV-targeting guide sequence portion
  source 1..20: mol_type = other RNA
cgcggactccccgtctgtgc

SEQ ID NO: 2600 - RNA, 20 nt, synthetic construct
  misc_feature 1..20: note = HBV-targeting guide sequence portion
  source 1..20: mol_type = other RNA
cgcggcgattgagatcttcg

SEQ ID NO: 2601 - RNA, 20 nt, synthetic construct
  misc_feature 1..20: note = HBV-targeting guide sequence portion
  source 1..20: mol_type = other RNA
cgcgggacgtcctttgttta

SEQ ID NO: 2602 - RNA, 20 nt, synthetic construct
  misc_feature 1..20: note = HBV-targeting guide sequence portion
  source 1..20: mol_type = other RNA
cgcgggattcagcgccgacg

SEQ ID NO: 2603 - RNA, 20 nt, synthetic construct
  misc_feature 1..20: note = HBV-targeting guide sequence portion
  source 1..20: mol_type = other RNA
cgcgtaaagagaggtgcgcc

SEQ ID NO: 2604 - RNA, 20 nt, synthetic construct
  misc_feature 1..20: note = HBV-targeting guide sequence portion
  source 1..20: mol_type = other RNA
cgcgtcgcagaagatctcaa

SEQ ID NO: 2605 - RNA, 20 nt, synthetic construct
  misc_feature 1..20: note = HBV-targeting guide sequence portion
  source 1..20: mol_type = other RNA
cgctatgtgttgacactctc

SEQ ID NO: 2606 - RNA, 20 nt, synthetic construct
  misc_feature 1..20: note = HBV-targeting guide sequence portion
  source 1..20: mol_type = other RNA
cgctgaacatggagaacatc

SEQ ID NO: 2607 - RNA, 20 nt, synthetic construct
  misc_feature 1..20: note = HBV-targeting guide sequence portion
  source 1..20: mol_type = other RNA
cgctgaatcccgcggacgac

SEQ ID NO: 2608 - RNA, 20 nt, synthetic construct
  misc_feature 1..20: note = HBV-targeting guide sequence portion
  source 1..20: mol_type = other RNA
cgctgatggcctatgaccaa

SEQ ID NO: 2609 - RNA, 20 nt, synthetic construct
  misc_feature 1..20: note = HBV-targeting guide sequence portion
  source 1..20: mol_type = other RNA
cgctggatgtgtctgcggcg

SEQ ID NO: 2610 - RNA, 20 nt, synthetic construct
  misc_feature 1..20: note = HBV-targeting guide sequence portion
  source 1..20: mol_type = other RNA
cgctgtctccacctctgaga

SEQ ID NO: 2611 - RNA, 20 nt, synthetic construct
  misc_feature 1..20: note = HBV-targeting guide sequence portion
  source 1..20: mol_type = other RNA
cgctgttaccaattttcttt

SEQ ID NO: 2612 - RNA, 20 nt, synthetic construct
  misc_feature 1..20: note = HBV-targeting guide sequence portion
  source 1..20: mol_type = other RNA
cgcttacagttaatgagaaa

SEQ ID NO: 2613 - RNA, 20 nt, synthetic construct
  misc_feature 1..20: note = HBV-targeting guide sequence portion
  source 1..20: mol_type = other RNA
cgcttcacctctgcacgtcg

SEQ ID NO: 2614 - RNA, 20 nt, synthetic construct
  misc_feature 1..20: note = HBV-targeting guide sequence portion
  source 1..20: mol_type = other RNA
cgcttggggccctgtcgtcc

SEQ ID NO: 2615 - RNA, 20 nt, synthetic construct
  misc_feature 1..20: note = HBV-targeting guide sequence portion
  source 1..20: mol_type = other RNA
cgcttgttttgctcgcagcc

SEQ ID NO: 2616 - RNA, 20 nt, synthetic construct
  misc_feature 1..20: note = HBV-targeting guide sequence portion
  source 1..20: mol_type = other RNA
cggaaaattcctatgggagt

SEQ ID NO: 2617 - RNA, 20 nt, synthetic construct
  misc_feature 1..20: note = HBV-targeting guide sequence portion
  source 1..20: mol_type = other RNA
cggaaaggttccacgcatgc

SEQ ID NO: 2618 - RNA, 20 nt, synthetic construct
  misc_feature 1..20: note = HBV-targeting guide sequence portion
  source 1..20: mol_type = other RNA
cggaacagggtttactgttc

SEQ ID NO: 2619 - RNA, 20 nt, synthetic construct
  misc_feature 1..20: note = HBV-targeting guide sequence portion
  source 1..20: mol_type = other RNA
cggaacggcaggcagagaag

SEQ ID NO: 2620 - RNA, 20 nt, synthetic construct
  misc_feature 1..20: note = HBV-targeting guide sequence portion
  source 1..20: mol_type = other RNA
cggaactcctagccgcttgt

SEQ ID NO: 2621 - RNA, 20 nt, synthetic construct
  misc_feature 1..20: note = HBV-targeting guide sequence portion
  source 1..20: mol_type = other RNA
cggaaggaaagaagtcagaa

SEQ ID NO: 2622 - RNA, 20 nt, synthetic construct
  misc_feature 1..20: note = HBV-targeting guide sequence portion
  source 1..20: mol_type = other RNA
cggaagtgttgataggatag

SEQ ID NO: 2623 - RNA, 20 nt, synthetic construct
  misc_feature 1..20: note = HBV-targeting guide sequence portion
  source 1..20: mol_type = other RNA
cggaccgtgtgcacttcgct

SEQ ID NO: 2624 - RNA, 20 nt, synthetic construct
  misc_feature 1..20: note = HBV-targeting guide sequence portion
  source 1..20: mol_type = other RNA
cggacgacccatctcgaggc

SEQ ID NO: 2625 - RNA, 20 nt, synthetic construct
  misc_feature 1..20: note = HBV-targeting guide sequence portion
  source 1..20: mol_type = other RNA
cggactccccgtctgtgcct

SEQ ID NO: 2626 - RNA, 20 nt, synthetic construct
  misc_feature 1..20: note = HBV-targeting guide sequence portion
  source 1..20: mol_type = other RNA
cggagacttgtgttgttaga

SEQ ID NO: 2627 - RNA, 20 nt, synthetic construct
  misc_feature 1..20: note = HBV-targeting guide sequence portion
  source 1..20: mol_type = other RNA
cggaggccttttggggtgga

SEQ ID NO: 2628 - RNA, 20 nt, synthetic construct
  misc_feature 1..20: note = HBV-targeting guide sequence portion
  source 1..20: mol_type = other RNA
cggatggaaactgcacctgt

SEQ ID NO: 2629 - RNA, 20 nt, synthetic construct
  misc_feature 1..20: note = HBV-targeting guide sequence portion
  source 1..20: mol_type = other RNA
cggatttgctggcaaggttt

SEQ ID NO: 2630 - RNA, 20 nt, synthetic construct
  misc_feature 1..20: note = HBV-targeting guide sequence portion
  source 1..20: mol_type = other RNA
cggcagaggagccggaaagg

SEQ ID NO: 2631 - RNA, 20 nt, synthetic construct
  misc_feature 1..20: note = HBV-targeting guide sequence portion
  source 1..20: mol_type = other RNA
cggcagatgagaaggcacag

SEQ ID NO: 2632 - RNA, 20 nt, synthetic construct
  misc_feature 1..20: note = HBV-targeting guide sequence portion
  source 1..20: mol_type = other RNA
cggcagcctaccccgctgtc

SEQ ID NO: 2633 - RNA, 20 nt, synthetic construct
  misc_feature 1..20: note = HBV-targeting guide sequence portion
  source 1..20: mol_type = other RNA
cggcaggcagagaagaggac

SEQ ID NO: 2634 - RNA, 20 nt, synthetic construct
  misc_feature 1..20: note = HBV-targeting guide sequence portion
  source 1..20: mol_type = other RNA
cggccaggtctgtgccaagt

SEQ ID NO: 2635 - RNA, 20 nt, synthetic construct
  misc_feature 1..20: note = HBV-targeting guide sequence portion
  source 1..20: mol_type = other RNA
cggcctcgagatgggtcgtc

SEQ ID NO: 2636 - RNA, 20 nt, synthetic construct
  misc_feature 1..20: note = HBV-targeting guide sequence portion
  source 1..20: mol_type = other RNA
cggcgattgagatcttcgtc

SEQ ID NO: 2637 - RNA, 20 nt, synthetic construct
  misc_feature 1..20: note = HBV-targeting guide sequence portion
  source 1..20: mol_type = other RNA
cggcgctgaatcccgcggac

SEQ ID NO: 2638 - RNA, 20 nt, synthetic construct
  misc_feature 1..20: note = HBV-targeting guide sequence portion
  source 1..20: mol_type = other RNA
cggcggtatctagaagatct

SEQ ID NO: 2639 - RNA, 20 nt, synthetic construct
  misc_feature 1..20: note = HBV-targeting guide sequence portion
  source 1..20: mol_type = other RNA
cggcgttttatcatcttcct

SEQ ID NO: 2640 - RNA, 20 nt, synthetic construct
  misc_feature 1..20: note = HBV-targeting guide sequence portion
  source 1..20: mol_type = other RNA
cggctaggagttccgcagta

SEQ ID NO: 2641 - RNA, 20 nt, synthetic construct
  misc_feature 1..20: note = HBV-targeting guide sequence portion
  source 1..20: mol_type = other RNA
cggctcctctgccgatccat

SEQ ID NO: 2642 - RNA, 20 nt, synthetic construct
  misc_feature 1..20: note = HBV-targeting guide sequence portion
  source 1..20: mol_type = other RNA
cggctgcgagcaaaacaagc

SEQ ID NO: 2643 - RNA, 20 nt, synthetic construct
  misc_feature 1..20: note = HBV-targeting guide sequence portion
  source 1..20: mol_type = other RNA
cgggaaacataccttgatag

SEQ ID NO: 2644 - RNA, 20 nt, synthetic construct
  misc_feature 1..20: note = HBV-targeting guide sequence portion
  source 1..20: mol_type = other RNA
cgggaaagaatcccagagga

SEQ ID NO: 2645 - RNA, 20 nt, synthetic construct
  misc_feature 1..20: note = HBV-targeting guide sequence portion
  source 1..20: mol_type = other RNA
cgggaccctgcagaacctgc

SEQ ID NO: 2646 - RNA, 20 nt, synthetic construct
  misc_feature 1..20: note = HBV-targeting guide sequence portion
  source 1..20: mol_type = other RNA
cgggacgtaaacaaaggacg

SEQ ID NO: 2647 - RNA, 20 nt, synthetic construct
  misc_feature 1..20: note = HBV-targeting guide sequence portion
  source 1..20: mol_type = other RNA
cgggacgtcctttgtttacg

SEQ ID NO: 2648 - RNA, 20 nt, synthetic construct
  misc_feature 1..20: note = HBV-targeting guide sequence portion
  source 1..20: mol_type = other RNA
cgggactgacaactctgttg

SEQ ID NO: 2649 - RNA, 20 nt, synthetic construct
  misc_feature 1..20: note = HBV-targeting guide sequence portion
  source 1..20: mol_type = other RNA
cgggagaggacaacagagtt

SEQ ID NO: 2650 - RNA, 20 nt, synthetic construct
  misc_feature 1..20: note = HBV-targeting guide sequence portion
  source 1..20: mol_type = other RNA
cgggagttttctgaaacatt

SEQ ID NO: 2651 - RNA, 20 nt, synthetic construct
  misc_feature 1..20: note = HBV-targeting guide sequence portion
  source 1..20: mol_type = other RNA
cgggatgccttggagtctcc

SEQ ID NO: 2652 - RNA, 20 nt, synthetic construct
  misc_feature 1..20: note = HBV-targeting guide sequence portion
  source 1..20: mol_type = other RNA
cgggattcagcgccgacggg

SEQ ID NO: 2653 - RNA, 20 nt, synthetic construct
  misc_feature 1..20: note = HBV-targeting guide sequence portion
  source 1..20: mol_type = other RNA
cgggcctacaaactgttcac

SEQ ID NO: 2654 - RNA, 20 nt, synthetic construct
  misc_feature 1..20: note = HBV-targeting guide sequence portion
  source 1..20: mol_type = other RNA
cgggctagggttcaccccac

SEQ ID NO: 2655 - RNA, 20 nt, synthetic construct
  misc_feature 1..20: note = HBV-targeting guide sequence portion
  source 1..20: mol_type = other RNA
cgggctgaggcccactccca

SEQ ID NO: 2656 - RNA, 20 nt, synthetic construct
  misc_feature 1..20: note = HBV-targeting guide sequence portion
  source 1..20: mol_type = other RNA
cggggagtccgcgtaaagag

SEQ ID NO: 2657 - RNA, 20 nt, synthetic construct
  misc_feature 1..20: note = HBV-targeting guide sequence portion
  source 1..20: mol_type = other RNA
cggggatctcaatgttagta

SEQ ID NO: 2658 - RNA, 20 nt, synthetic construct
  misc_feature 1..20: note = HBV-targeting guide sequence portion
  source 1..20: mol_type = other RNA
cggggcgcacctctctttac

SEQ ID NO: 2659 - RNA, 20 nt, synthetic construct
  misc_feature 1..20: note = HBV-targeting guide sequence portion
  source 1..20: mol_type = other RNA
cggggctttattcttctact

SEQ ID NO: 2660 - RNA, 20 nt, synthetic construct
  misc_feature 1..20: note = HBV-targeting guide sequence portion
  source 1..20: mol_type = other RNA
cggggtaaaggttcaggtat

SEQ ID NO: 2661 - RNA, 20 nt, synthetic construct
  misc_feature 1..20: note = HBV-targeting guide sequence portion
  source 1..20: mol_type = other RNA
cggggtaggctgccgtcctg

SEQ ID NO: 2662 - RNA, 20 nt, synthetic construct
  misc_feature 1..20: note = HBV-targeting guide sequence portion
  source 1..20: mol_type = other RNA
cggggttttccttgttgaca

SEQ ID NO: 2663 - RNA, 20 nt, synthetic construct
  misc_feature 1..20: note = HBV-targeting guide sequence portion
  source 1..20: mol_type = other RNA
cgggtgttttatataagaga

SEQ ID NO: 2664 - RNA, 20 nt, synthetic construct
  misc_feature 1..20: note = HBV-targeting guide sequence portion
  source 1..20: mol_type = other RNA
cggtagttccccctagaaaa

SEQ ID NO: 2665 - RNA, 20 nt, synthetic construct
  misc_feature 1..20: note = HBV-targeting guide sequence portion
  source 1..20: mol_type = other RNA
cggtataaagggactcaaga

SEQ ID NO: 2666 - RNA, 20 nt, synthetic construct
  misc_feature 1..20: note = HBV-targeting guide sequence portion
  source 1..20: mol_type = other RNA
cggtatctagaagatctcgt

SEQ ID NO: 2667 - RNA, 20 nt, synthetic construct
  misc_feature 1..20: note = HBV-targeting guide sequence portion
  source 1..20: mol_type = other RNA
cggtattgtgaggattcttg

SEQ ID NO: 2668 - RNA, 20 nt, synthetic construct
  misc_feature 1..20: note = HBV-targeting guide sequence portion
  source 1..20: mol_type = other RNA
cggtccggcagatgagaagg

SEQ ID NO: 2669 - RNA, 20 nt, synthetic construct
  misc_feature 1..20: note = HBV-targeting guide sequence portion
  source 1..20: mol_type = other RNA
cggtcctagagtatttggtg

SEQ ID NO: 2670 - RNA, 20 nt, synthetic construct
  misc_feature 1..20: note = HBV-targeting guide sequence portion
  source 1..20: mol_type = other RNA
cggtcggaacggcaggcaga

SEQ ID NO: 2671 - RNA, 20 nt, synthetic construct
  misc_feature 1..20: note = HBV-targeting guide sequence portion
  source 1..20: mol_type = other RNA
cggtcgttgacattgcagag

SEQ ID NO: 2672 - RNA, 20 nt, synthetic construct
  misc_feature 1..20: note = HBV-targeting guide sequence portion
  source 1..20: mol_type = other RNA
cggtctggagcaaacattct

SEQ ID NO: 2673 - RNA, 20 nt, synthetic construct
  misc_feature 1..20: note = HBV-targeting guide sequence portion
  source 1..20: mol_type = other RNA
cggtggggtgaaccctagcc

SEQ ID NO: 2674 - RNA, 20 nt, synthetic construct
  misc_feature 1..20: note = HBV-targeting guide sequence portion
  source 1..20: mol_type = other RNA
cggtggtctccatgcgacgt

SEQ ID NO: 2675 - RNA, 20 nt, synthetic construct
  misc_feature 1..20: note = HBV-targeting guide sequence portion
  source 1..20: mol_type = other RNA
cggttaacaggcctattgat

SEQ ID NO: 2676 - RNA, 20 nt, synthetic construct
  misc_feature 1..20: note = HBV-targeting guide sequence portion
  source 1..20: mol_type = other RNA
cggttgaaattgattatgcc

SEQ ID NO: 2677 - RNA, 20 nt, synthetic construct
  misc_feature 1..20: note = HBV-targeting guide sequence portion
  source 1..20: mol_type = other RNA
cgtaaaatttcccaccttat

SEQ ID NO: 2678 - RNA, 20 nt, synthetic construct
  misc_feature 1..20: note = HBV-targeting guide sequence portion
  source 1..20: mol_type = other RNA
cgtaaacaaaggacgtcccg

SEQ ID NO: 2679 - RNA, 20 nt, synthetic construct
  misc_feature 1..20: note = HBV-targeting guide sequence portion
  source 1..20: mol_type = other RNA
cgtaaagagaggtgcgcccc

SEQ ID NO: 2680 - RNA, 20 nt, synthetic construct
  misc_feature 1..20: note = HBV-targeting guide sequence portion
  source 1..20: mol_type = other RNA
cgtacgagatcttctagata

SEQ ID NO: 2681 - RNA, 20 nt, synthetic construct
  misc_feature 1..20: note = HBV-targeting guide sequence portion
  source 1..20: mol_type = other RNA
cgtacggaaggaaagaagtc

SEQ ID NO: 2682 - RNA, 20 nt, synthetic construct
  misc_feature 1..20: note = HBV-targeting guide sequence portion
  source 1..20: mol_type = other RNA
cgtagggctttcccccactg

SEQ ID NO: 2683 - RNA, 20 nt, synthetic construct
  misc_feature 1..20: note = HBV-targeting guide sequence portion
  source 1..20: mol_type = other RNA
cgtcaatcttctcgaggatt

SEQ ID NO: 2684 - RNA, 20 nt, synthetic construct
  misc_feature 1..20: note = HBV-targeting guide sequence portion
  source 1..20: mol_type = other RNA
cgtcccgcgcaggatccagt

SEQ ID NO: 2685 - RNA, 20 nt, synthetic construct
  misc_feature 1..20: note = HBV-targeting guide sequence portion
  source 1..20: mol_type = other RNA
cgtcccgtcggcgctgaatc

SEQ ID NO: 2686 - RNA, 20 nt, synthetic construct
  misc_feature 1..20: note = HBV-targeting guide sequence portion
  source 1..20: mol_type = other RNA
cgtccgcgggattcagcgcc

SEQ ID NO: 2687 - RNA, 20 nt, synthetic construct
  misc_feature 1..20: note = HBV-targeting guide sequence portion
  source 1..20: mol_type = other RNA
cgtcctcttctctgcctgcc

SEQ ID NO: 2688 - RNA, 20 nt, synthetic construct
  misc_feature 1..20: note = HBV-targeting guide sequence portion
  source 1..20: mol_type = other RNA
cgtcctgactggcgattggt

SEQ ID NO: 2689 - RNA, 20 nt, synthetic construct
  misc_feature 1..20: note = HBV-targeting guide sequence portion
  source 1..20: mol_type = other RNA
cgtcctttgtttacgtcccg

SEQ ID NO: 2690 - RNA, 20 nt, synthetic construct
  misc_feature 1..20: note = HBV-targeting guide sequence portion
  source 1..20: mol_type = other RNA
cgtcgcagaagatctcaatc

SEQ ID NO: 2691 - RNA, 20 nt, synthetic construct
  misc_feature 1..20: note = HBV-targeting guide sequence portion
  source 1..20: mol_type = other RNA
cgtcgcatggagaccaccgt

SEQ ID NO: 2692 - RNA, 20 nt, synthetic construct
  misc_feature 1..20: note = HBV-targeting guide sequence portion
  source 1..20: mol_type = other RNA
cgtcggcgctgaatcccgcg

SEQ ID NO: 2693 - RNA, 20 nt, synthetic construct
  misc_feature 1..20: note = HBV-targeting guide sequence portion
  source 1..20: mol_type = other RNA
cgtcgtctaacaacacaagt

SEQ ID NO: 2694 - RNA, 20 nt, synthetic construct
  misc_feature 1..20: note = HBV-targeting guide sequence portion
  source 1..20: mol_type = other RNA
cgtctaacaacacaagtctc

SEQ ID NO: 2695 - RNA, 20 nt, synthetic construct
  misc_feature 1..20: note = HBV-targeting guide sequence portion
  source 1..20: mol_type = other RNA
cgtctgcgaggcgagggagt

SEQ ID NO: 2696 - RNA, 20 nt, synthetic construct
  misc_feature 1..20: note = HBV-targeting guide sequence portion
  source 1..20: mol_type = other RNA
cgtctggccagggatccttg

SEQ ID NO: 2697 - RNA, 20 nt, synthetic construct
  misc_feature 1..20: note = HBV-targeting guide sequence portion
  source 1..20: mol_type = other RNA
cgtctgtcctctaattccag

SEQ ID NO: 2698 - RNA, 20 nt, synthetic construct
  misc_feature 1..20: note = HBV-targeting guide sequence portion
  source 1..20: mol_type = other RNA
cgtctgtgccttctcatctg

SEQ ID NO: 2699 - RNA, 20 nt, synthetic construct
  misc_feature 1..20: note = HBV-targeting guide sequence portion
  source 1..20: mol_type = other RNA
cgtcttttctcattaactgt

SEQ ID NO: 2700 - RNA, 20 nt, synthetic construct
  misc_feature 1..20: note = HBV-targeting guide sequence portion
  source 1..20: mol_type = other RNA
cgtgaacgcccaccaattct

SEQ ID NO: 2701 - RNA, 20 nt, synthetic construct
  misc_feature 1..20: note = HBV-targeting guide sequence portion
  source 1..20: mol_type = other RNA
cgtgcagaggtgaagcgaag

SEQ ID NO: 2702 - RNA, 20 nt, synthetic construct
  misc_feature 1..20: note = HBV-targeting guide sequence portion
  source 1..20: mol_type = other RNA
cgtgcaggttctgcagggtc

SEQ ID NO: 2703 - RNA, 20 nt, synthetic construct
  misc_feature 1..20: note = HBV-targeting guide sequence portion
  source 1..20: mol_type = other RNA
cgtgcggtggggtgaaccct

SEQ ID NO: 2704 - RNA, 20 nt, synthetic construct
  misc_feature 1..20: note = HBV-targeting guide sequence portion
  source 1..20: mol_type = other RNA
cgtgctggtggttgatgatc

SEQ ID NO: 2705 - RNA, 20 nt, synthetic construct
  misc_feature 1..20: note = HBV-targeting guide sequence portion
  source 1..20: mol_type = other RNA
cgtggaacctttccggctcc

SEQ ID NO: 2706 - RNA, 20 nt, synthetic construct
  misc_feature 1..20: note = HBV-targeting guide sequence portion
  source 1..20: mol_type = other RNA
cgtggtcggtcggaacggca

SEQ ID NO: 2707 - RNA, 20 nt, synthetic construct
  misc_feature 1..20: note = HBV-targeting guide sequence portion
  source 1..20: mol_type = other RNA
cgtggtggacttctctcaat

SEQ ID NO: 2708 - RNA, 20 nt, synthetic construct
  misc_feature 1..20: note = HBV-targeting guide sequence portion
  source 1..20: mol_type = other RNA
cgtgtgcacttcgcttcacc

SEQ ID NO: 2709 - RNA, 20 nt, synthetic construct
  misc_feature 1..20: note = HBV-targeting guide sequence portion
  source 1..20: mol_type = other RNA
cgtgtgtcttggccaaaatt

SEQ ID NO: 2710 - RNA, 20 nt, synthetic construct
  misc_feature 1..20: note = HBV-targeting guide sequence portion
  source 1..20: mol_type = other RNA
cgtgttacaggcggggtttt

SEQ ID NO: 2711 - RNA, 20 nt, synthetic construct
  misc_feature 1..20: note = HBV-targeting guide sequence portion
  source 1..20: mol_type = other RNA
cgttcacggtggtctccatg

SEQ ID NO: 2712 - RNA, 20 nt, synthetic construct
  misc_feature 1..20: note = HBV-targeting guide sequence portion
  source 1..20: mol_type = other RNA
cgttcccatggctgctaggc

SEQ ID NO: 2713 - RNA, 20 nt, synthetic construct
  misc_feature 1..20: note = HBV-targeting guide sequence portion
  source 1..20: mol_type = other RNA
cgttccgaccgaccacgggg

SEQ ID NO: 2714 - RNA, 20 nt, synthetic construct
  misc_feature 1..20: note = HBV-targeting guide sequence portion
  source 1..20: mol_type = other RNA
cgttgacacactttccaatc

SEQ ID NO: 2715 - RNA, 20 nt, synthetic construct
  misc_feature 1..20: note = HBV-targeting guide sequence portion
  source 1..20: mol_type = other RNA
cgttgacattgcagagagtc

SEQ ID NO: 2716 - RNA, 20 nt, synthetic construct
  misc_feature 1..20: note = HBV-targeting guide sequence portion
  source 1..20: mol_type = other RNA
cgttgccaggcaacggccag

SEQ ID NO: 2717 - RNA, 20 nt, synthetic construct
  misc_feature 1..20: note = HBV-targeting guide sequence portion
  source 1..20: mol_type = other RNA
cgttgcctggcaacggggta

SEQ ID NO: 2718 - RNA, 20 nt, synthetic construct
  misc_feature 1..20: note = HBV-targeting guide sequence portion
  source 1..20: mol_type = other RNA
cgtttctcttccaaaagtaa

SEQ ID NO: 2719 - RNA, 20 nt, synthetic construct
  misc_feature 1..20: note = HBV-targeting guide sequence portion
  source 1..20: mol_type = other RNA
cgtttctcttggctcagttt

SEQ ID NO: 2720 - RNA, 20 nt, synthetic construct
  misc_feature 1..20: note = HBV-targeting guide sequence portion
  source 1..20: mol_type = other RNA
cgttttatcatcttcctctt

SEQ ID NO: 2721 - RNA, 20 nt, synthetic construct
  misc_feature 1..20: note = HBV-targeting guide sequence portion
  source 1..20: mol_type = other RNA
cgtttttgccttctgacttc

SEQ ID NO: 2722 - RNA, 20 nt, synthetic construct
  misc_feature 1..20: note = HBV-targeting guide sequence portion
  source 1..20: mol_type = other RNA
ctaaagccacccaaggcaca

SEQ ID NO: 2723 - RNA, 20 nt, synthetic construct
  misc_feature 1..20: note = HBV-targeting guide sequence portion
  source 1..20: mol_type = other RNA
ctaaagttcagacaactatt

SEQ ID NO: 2724 - RNA, 20 nt, synthetic construct
  misc_feature 1..20: note = HBV-targeting guide sequence portion
  source 1..20: mol_type = other RNA
ctaaattagtacccacccag

SEQ ID NO: 2725 - RNA, 20 nt, synthetic construct
  misc_feature 1..20: note = HBV-targeting guide sequence portion
  source 1..20: mol_type = other RNA
ctaaattcaccaaatacttg

SEQ ID NO: 2726 - RNA, 20 nt, synthetic construct
  misc_feature 1..20: note = HBV-targeting guide sequence portion
  source 1..20: mol_type = other RNA
ctaacaaaacaaagagatgg

SEQ ID NO: 2727 - RNA, 20 nt, synthetic construct
  misc_feature 1..20: note = HBV-targeting guide sequence portion
  source 1..20: mol_type = other RNA
ctaacaacacaagtctccgg

SEQ ID NO: 2728 - RNA, 20 nt, synthetic construct
  misc_feature 1..20: note = HBV-targeting guide sequence portion
  source 1..20: mol_type = other RNA
ctaacattgagatccccgag

SEQ ID NO: 2729 - RNA, 20 nt, synthetic construct
  misc_feature 1..20: note = HBV-targeting guide sequence portion
  source 1..20: mol_type = other RNA
ctaagcaggctttcactttt

SEQ ID NO: 2730 - RNA, 20 nt, synthetic construct
  misc_feature 1..20: note = HBV-targeting guide sequence portion
  source 1..20: mol_type = other RNA
ctaatatacatctacaccaa

SEQ ID NO: 2731 - RNA, 20 nt, synthetic construct
  misc_feature 1..20: note = HBV-targeting guide sequence portion
  source 1..20: mol_type = other RNA
ctaatcatctcttgttcatg

SEQ ID NO: 2732 - RNA, 20 nt, synthetic construct
  misc_feature 1..20: note = HBV-targeting guide sequence portion
  source 1..20: mol_type = other RNA
ctaatctcctcccccaactc

SEQ ID NO: 2733 - RNA, 20 nt, synthetic construct
  misc_feature 1..20: note = HBV-targeting guide sequence portion
  source 1..20: mol_type = other RNA
ctaatgactctagctacctg

SEQ ID NO: 2734 - RNA, 20 nt, synthetic construct
  misc_feature 1..20: note = HBV-targeting guide sequence portion
  source 1..20: mol_type = other RNA
ctaattccaggatcatcaac

SEQ ID NO: 2735 - RNA, 20 nt, synthetic construct
  misc_feature 1..20: note = HBV-targeting guide sequence portion
  source 1..20: mol_type = other RNA
ctaatttagaagatcaagca

SEQ ID NO: 2736 - RNA, 20 nt, synthetic construct
  misc_feature 1..20: note = HBV-targeting guide sequence portion
  source 1..20: mol_type = other RNA
ctacaaactgttcacatttt

SEQ ID NO: 2737 - RNA, 20 nt, synthetic construct
  misc_feature 1..20: note = HBV-targeting guide sequence portion
  source 1..20: mol_type = other RNA
ctacaccaagatattatcaa

SEQ ID NO: 2738 - RNA, 20 nt, synthetic construct
  misc_feature 1..20: note = HBV-targeting guide sequence portion
  source 1..20: mol_type = other RNA
ctacagcatggggcagaatc

SEQ ID NO: 2739 - RNA, 20 nt, synthetic construct
  misc_feature 1..20: note = HBV-targeting guide sequence portion
  source 1..20: mol_type = other RNA
ctacagcctcctagtacaaa

SEQ ID NO: 2740 - RNA, 20 nt, synthetic construct
  misc_feature 1..20: note = HBV-targeting guide sequence portion
  source 1..20: mol_type = other RNA
ctaccaatcgccagtcagga

SEQ ID NO: 2741 - RNA, 20 nt, synthetic construct
  misc_feature 1..20: note = HBV-targeting guide sequence portion
  source 1..20: mol_type = other RNA
ctaccccgctgtctccacct

SEQ ID NO: 2742 - RNA, 20 nt, synthetic construct
  misc_feature 1..20: note = HBV-targeting guide sequence portion
  source 1..20: mol_type = other RNA
ctaccgtgtgtcttggccaa

SEQ ID NO: 2743 - RNA, 20 nt, synthetic construct
  misc_feature 1..20: note = HBV-targeting guide sequence portion
  source 1..20: mol_type = other RNA
ctacctgggtgggtactaat

SEQ ID NO: 2744 - RNA, 20 nt, synthetic construct
  misc_feature 1..20: note = HBV-targeting guide sequence portion
  source 1..20: mol_type = other RNA
ctaccttgttggcgtctggc

SEQ ID NO: 2745 - RNA, 20 nt, synthetic construct
  misc_feature 1..20: note = HBV-targeting guide sequence portion
  source 1..20: mol_type = other RNA
ctacgaaccactgaacaaat

SEQ ID NO: 2746 - RNA, 20 nt, synthetic construct
  misc_feature 1..20: note = HBV-targeting guide sequence portion
  source 1..20: mol_type = other RNA
ctactaggtccctagatgct

SEQ ID NO: 2747 - RNA, 20 nt, synthetic construct
  misc_feature 1..20: note = HBV-targeting guide sequence portion
  source 1..20: mol_type = other RNA
ctactgcctctcacatatcg

SEQ ID NO: 2748 - RNA, 20 nt, synthetic construct
  misc_feature 1..20: note = HBV-targeting guide sequence portion
  source 1..20: mol_type = other RNA
ctactgtacctgtctttaac

SEQ ID NO: 2749 - RNA, 20 nt, synthetic construct
  misc_feature 1..20: note = HBV-targeting guide sequence portion
  source 1..20: mol_type = other RNA
ctactgtggagttactctcg

SEQ ID NO: 2750 - RNA, 20 nt, synthetic construct
  misc_feature 1..20: note = HBV-targeting guide sequence portion
  source 1..20: mol_type = other RNA
ctactgttcaagcctccaag

SEQ ID NO: 2751 - RNA, 20 nt, synthetic construct
  misc_feature 1..20: note = HBV-targeting guide sequence portion
  source 1..20: mol_type = other RNA
ctagaaaattgagagaagtc

SEQ ID NO: 2752 - RNA, 20 nt, synthetic construct
  misc_feature 1..20: note = HBV-targeting guide sequence portion
  source 1..20: mol_type = other RNA
ctagaagaagaactccctcg

SEQ ID NO: 2753 - RNA, 20 nt, synthetic construct
  misc_feature 1..20: note = HBV-targeting guide sequence portion
  source 1..20: mol_type = other RNA
ctagaagatctcgtacggaa

SEQ ID NO: 2754 - RNA, 20 nt, synthetic construct
  misc_feature 1..20: note = HBV-targeting guide sequence portion
  source 1..20: mol_type = other RNA
ctagacactatttacacact

SEQ ID NO: 2755 - RNA, 20 nt, synthetic construct
  misc_feature 1..20: note = HBV-targeting guide sequence portion
  source 1..20: mol_type = other RNA
ctagactcgtggtggacttc

SEQ ID NO: 2756 - RNA, 20 nt, synthetic construct
  misc_feature 1..20: note = HBV-targeting guide sequence portion
  source 1..20: mol_type = other RNA
ctagactctgcggtattgtg

SEQ ID NO: 2757 - RNA, 20 nt, synthetic construct
  misc_feature 1..20: note = HBV-targeting guide sequence portion
  source 1..20: mol_type = other RNA
ctagagtatttggtgtcttt

SEQ ID NO: 2758 - RNA, 20 nt, synthetic construct
  misc_feature 1..20: note = HBV-targeting guide sequence portion
  source 1..20: mol_type = other RNA
ctagagtcattagttctccc

SEQ ID NO: 2759 - RNA, 20 nt, synthetic construct
  misc_feature 1..20: note = HBV-targeting guide sequence portion
  source 1..20: mol_type = other RNA
ctagataccgccgcagctct

SEQ ID NO: 2760 - RNA, 20 nt, synthetic construct
  misc_feature 1..20: note = HBV-targeting guide sequence portion
  source 1..20: mol_type = other RNA
ctagatgcttgatcttctaa

SEQ ID NO: 2761 - RNA, 20 nt, synthetic construct
  misc_feature 1..20: note = HBV-targeting guide sequence portion
  source 1..20: mol_type = other RNA
ctagatgttctggataataa

SEQ ID NO: 2762 - RNA, 20 nt, synthetic construct
  misc_feature 1..20: note = HBV-targeting guide sequence portion
  source 1..20: mol_type = other RNA
ctagcagccatgggaacgat

SEQ ID NO: 2763 - RNA, 20 nt, synthetic construct
  misc_feature 1..20: note = HBV-targeting guide sequence portion
  source 1..20: mol_type = other RNA
ctagcaggcataatcaattt

SEQ ID NO: 2764 - RNA, 20 nt, synthetic construct
  misc_feature 1..20: note = HBV-targeting guide sequence portion
  source 1..20: mol_type = other RNA
ctagcccgaatgctccagct

SEQ ID NO: 2765 - RNA, 20 nt, synthetic construct
  misc_feature 1..20: note = HBV-targeting guide sequence portion
  source 1..20: mol_type = other RNA
ctagccgcttgttttgctcg

SEQ ID NO: 2766 - RNA, 20 nt, synthetic construct
  misc_feature 1..20: note = HBV-targeting guide sequence portion
  source 1..20: mol_type = other RNA
ctagctacctgggtgggtac

SEQ ID NO: 2767 - RNA, 20 nt, synthetic construct
  misc_feature 1..20: note = HBV-targeting guide sequence portion
  source 1..20: mol_type = other RNA
ctaggaatcctgatgtgatg

SEQ ID NO: 2768 - RNA, 20 nt, synthetic construct
  misc_feature 1..20: note = HBV-targeting guide sequence portion
  source 1..20: mol_type = other RNA
ctaggacccctgctcgtgtt

SEQ ID NO: 2769 - RNA, 20 nt, synthetic construct
  misc_feature 1..20: note = HBV-targeting guide sequence portion
  source 1..20: mol_type = other RNA
ctaggaccgtttctcttcca

SEQ ID NO: 2770 - RNA, 20 nt, synthetic construct
  misc_feature 1..20: note = HBV-targeting guide sequence portion
  source 1..20: mol_type = other RNA
ctaggaggctgtaggcataa

SEQ ID NO: 2771 - RNA, 20 nt, synthetic construct
  misc_feature 1..20: note = HBV-targeting guide sequence portion
  source 1..20: mol_type = other RNA
ctaggagttccgcagtatgg

SEQ ID NO: 2772 - RNA, 20 nt, synthetic construct
  misc_feature 1..20: note = HBV-targeting guide sequence portion
  source 1..20: mol_type = other RNA
ctaggctgtgctgccaactg

SEQ ID NO: 2773 - RNA, 20 nt, synthetic construct
  misc_feature 1..20: note = HBV-targeting guide sequence portion
  source 1..20: mol_type = other RNA
ctagggacctagtagtcagt

SEQ ID NO: 2774 - RNA, 20 nt, synthetic construct
  misc_feature 1..20: note = HBV-targeting guide sequence portion
  source 1..20: mol_type = other RNA
ctaggggacctgcctcgtcg

SEQ ID NO: 2775 - RNA, 20 nt, synthetic construct
  misc_feature 1..20: note = HBV-targeting guide sequence portion
  source 1..20: mol_type = other RNA
ctagggggaactaccgtgtg

SEQ ID NO: 2776 - RNA, 20 nt, synthetic construct
  misc_feature 1..20: note = HBV-targeting guide sequence portion
  source 1..20: mol_type = other RNA
ctagggttcaccccaccgca

SEQ ID NO: 2777 - RNA, 20 nt, synthetic construct
  misc_feature 1..20: note = HBV-targeting guide sequence portion
  source 1..20: mol_type = other RNA
ctaggtccctagatgcttga

SEQ ID NO: 2778 - RNA, 20 nt, synthetic construct
  misc_feature 1..20: note = HBV-targeting guide sequence portion
  source 1..20: mol_type = other RNA
ctaggttttatcctaaattc

SEQ ID NO: 2779 - RNA, 20 nt, synthetic construct
  misc_feature 1..20: note = HBV-targeting guide sequence portion
  source 1..20: mol_type = other RNA
ctagtaaactgagccaagag

SEQ ID NO: 2780 - RNA, 20 nt, synthetic construct
  misc_feature 1..20: note = HBV-targeting guide sequence portion
  source 1..20: mol_type = other RNA
ctagtacaaagatcattaat

SEQ ID NO: 2781 - RNA, 20 nt, synthetic construct
  misc_feature 1..20: note = HBV-targeting guide sequence portion
  source 1..20: mol_type = other RNA
ctagtagtcagttatgtcaa

SEQ ID NO: 2782 - RNA, 20 nt, synthetic construct
  misc_feature 1..20: note = HBV-targeting guide sequence portion
  source 1..20: mol_type = other RNA
ctagtgccatttgttcagtg

SEQ ID NO: 2783 - RNA, 20 nt, synthetic construct
  misc_feature 1..20: note = HBV-targeting guide sequence portion
  source 1..20: mol_type = other RNA
ctagttaatcattacttcca

SEQ ID NO: 2784 - RNA, 20 nt, synthetic construct
  misc_feature 1..20: note = HBV-targeting guide sequence portion
  source 1..20: mol_type = other RNA
ctagtttggaagtaatgatt

SEQ ID NO: 2785 - RNA, 20 nt, synthetic construct
  misc_feature 1..20: note = HBV-targeting guide sequence portion
  source 1..20: mol_type = other RNA
ctataagctggaggagtgcg

SEQ ID NO: 2786 - RNA, 20 nt, synthetic construct
  misc_feature 1..20: note = HBV-targeting guide sequence portion
  source 1..20: mol_type = other RNA
ctatcaacacttccggagac

SEQ ID NO: 2787 - RNA, 20 nt, synthetic construct
  misc_feature 1..20: note = HBV-targeting guide sequence portion
  source 1..20: mol_type = other RNA
ctatcaaggtatgtttcccg

SEQ ID NO: 2788 - RNA, 20 nt, synthetic construct
  misc_feature 1..20: note = HBV-targeting guide sequence portion
  source 1..20: mol_type = other RNA
ctatcctatcaacacttccg

SEQ ID NO: 2789 - RNA, 20 nt, synthetic construct
  misc_feature 1..20: note = HBV-targeting guide sequence portion
  source 1..20: mol_type = other RNA
ctatgaccaagccccaacca

SEQ ID NO: 2790 - RNA, 20 nt, synthetic construct
  misc_feature 1..20: note = HBV-targeting guide sequence portion
  source 1..20: mol_type = other RNA
ctatgcctcatcttcttgtt

SEQ ID NO: 2791 - RNA, 20 nt, synthetic construct
  misc_feature 1..20: note = HBV-targeting guide sequence portion
  source 1..20: mol_type = other RNA
ctatggaaggcgggtgtttt

SEQ ID NO: 2792 - RNA, 20 nt, synthetic construct
  misc_feature 1..20: note = HBV-targeting guide sequence portion
  source 1..20: mol_type = other RNA
ctatgggagtgggcctcagc

SEQ ID NO: 2793 - RNA, 20 nt, synthetic construct
  misc_feature 1..20: note = HBV-targeting guide sequence portion
  source 1..20: mol_type = other RNA
ctatgtatccctcctgttgc

SEQ ID NO: 2794 - RNA, 20 nt, synthetic construct
  misc_feature 1..20: note = HBV-targeting guide sequence portion
  source 1..20: mol_type = other RNA
ctatgtcattgattgttggg

SEQ ID NO: 2795 - RNA, 20 nt, synthetic construct
  misc_feature 1..20: note = HBV-targeting guide sequence portion
  source 1..20: mol_type = other RNA
ctatgtgttgacactctctt

SEQ ID NO: 2796 - RNA, 20 nt, synthetic construct
  misc_feature 1..20: note = HBV-targeting guide sequence portion
  source 1..20: mol_type = other RNA
ctattgattggaaagtgtgt

SEQ ID NO: 2797 - RNA, 20 nt, synthetic construct
  misc_feature 1..20: note = HBV-targeting guide sequence portion
  source 1..20: mol_type = other RNA
ctattgtggtttcacatttc

SEQ ID NO: 2798 - RNA, 20 nt, synthetic construct
  misc_feature 1..20: note = HBV-targeting guide sequence portion
  source 1..20: mol_type = other RNA
ctatttacacactctatgga

SEQ ID NO: 2799 - RNA, 20 nt, synthetic construct
  misc_feature 1..20: note = HBV-targeting guide sequence portion
  source 1..20: mol_type = other RNA
ctcaagatgctgtacagact

SEQ ID NO: 2800 - RNA, 20 nt, synthetic construct
  misc_feature 1..20: note = HBV-targeting guide sequence portion
  source 1..20: mol_type = other RNA
ctcaaggaacctctatgtat

SEQ ID NO: 2801 - RNA, 20 nt, synthetic construct
  misc_feature 1..20: note = HBV-targeting guide sequence portion
  source 1..20: mol_type = other RNA
ctcaaggtcggtcgttgaca

SEQ ID NO: 2802 - RNA, 20 nt, synthetic construct
  misc_feature 1..20: note = HBV-targeting guide sequence portion
  source 1..20: mol_type = other RNA
ctcaatcgccgcgtcgcaga

SEQ ID NO: 2803 - RNA, 20 nt, synthetic construct
  misc_feature 1..20: note = HBV-targeting guide sequence portion
  source 1..20: mol_type = other RNA
ctcaatctcggggatctcaa

SEQ ID NO: 2804 - RNA, 20 nt, synthetic construct
  misc_feature 1..20: note = HBV-targeting guide sequence portion
  source 1..20: mol_type = other RNA
ctcaatgttagtatcccttg

SEQ ID NO: 2805 - RNA, 20 nt, synthetic construct
  misc_feature 1..20: note = HBV-targeting guide sequence portion
  source 1..20: mol_type = other RNA
ctcaattttctagggggaac

SEQ ID NO: 2806 - RNA, 20 nt, synthetic construct
  misc_feature 1..20: note = HBV-targeting guide sequence portion
  source 1..20: mol_type = other RNA
ctcacaataccgcagagtct

SEQ ID NO: 2807 - RNA, 20 nt, synthetic construct
  misc_feature 1..20: note = HBV-targeting guide sequence portion
  source 1..20: mol_type = other RNA
ctcacatatcgtcaatcttc

SEQ ID NO: 2808 - RNA, 20 nt, synthetic construct
  misc_feature 1..20: note = HBV-targeting guide sequence portion
  source 1..20: mol_type = other RNA
ctcaccaacctcctgtcctc

SEQ ID NO: 2809 - RNA, 20 nt, synthetic construct
  misc_feature 1..20: note = HBV-targeting guide sequence portion
  source 1..20: mol_type = other RNA
ctcaccatactgcactcagg

SEQ ID NO: 2810 - RNA, 20 nt, synthetic construct
  misc_feature 1..20: note = HBV-targeting guide sequence portion
  source 1..20: mol_type = other RNA
ctcactctgggatcttgcag

SEQ ID NO: 2811 - RNA, 20 nt, synthetic construct
  misc_feature 1..20: note = HBV-targeting guide sequence portion
  source 1..20: mol_type = other RNA
ctcagaggtggagacagcgg

SEQ ID NO: 2812 - RNA, 20 nt, synthetic construct
  misc_feature 1..20: note = HBV-targeting guide sequence portion
  source 1..20: mol_type = other RNA
ctcagcccgtttctcttggc

SEQ ID NO: 2813 - RNA, 20 nt, synthetic construct
  misc_feature 1..20: note = HBV-targeting guide sequence portion
  source 1..20: mol_type = other RNA
ctcaggagactccaaggcat

SEQ ID NO: 2814 - RNA, 20 nt, synthetic construct
  misc_feature 1..20: note = HBV-targeting guide sequence portion
  source 1..20: mol_type = other RNA
ctcaggcaagcaattctttg

SEQ ID NO: 2815 - RNA, 20 nt, synthetic construct
  misc_feature 1..20: note = HBV-targeting guide sequence portion
  source 1..20: mol_type = other RNA
ctcaggctcagggcataatg

SEQ ID NO: 2816 - RNA, 20 nt, synthetic construct
  misc_feature 1..20: note = HBV-targeting guide sequence portion
  source 1..20: mol_type = other RNA
ctcagggcataatgcaaacc

SEQ ID NO: 2817 - RNA, 20 nt, synthetic construct
  misc_feature 1..20: note = HBV-targeting guide sequence portion
  source 1..20: mol_type = other RNA
ctcagtttactagtgccatt

SEQ ID NO: 2818 - RNA, 20 nt, synthetic construct
  misc_feature 1..20: note = HBV-targeting guide sequence portion
  source 1..20: mol_type = other RNA
ctcataaggtgggaaatttt

SEQ ID NO: 2819 - RNA, 20 nt, synthetic construct
  misc_feature 1..20: note = HBV-targeting guide sequence portion
  source 1..20: mol_type = other RNA
ctcatatgggcctaaagttc

SEQ ID NO: 2820 - RNA, 20 nt, synthetic construct
  misc_feature 1..20: note = HBV-targeting guide sequence portion
  source 1..20: mol_type = other RNA
ctcatctgccggaccgtgtg

SEQ ID NO: 2821 - RNA, 20 nt, synthetic construct
  misc_feature 1..20: note = HBV-targeting guide sequence portion
  source 1..20: mol_type = other RNA
ctcatcttcttgttggttct

SEQ ID NO: 2822 - RNA, 20 nt, synthetic construct
  misc_feature 1..20: note = HBV-targeting guide sequence portion
  source 1..20: mol_type = other RNA
ctcattaactgtaagcgggc

SEQ ID NO: 2823 - RNA, 20 nt, synthetic construct
  misc_feature 1..20: note = HBV-targeting guide sequence portion
  source 1..20: mol_type = other RNA
ctcattctgtgggtcaccat

SEQ ID NO: 2824 - RNA, 20 nt, synthetic construct
  misc_feature 1..20: note = HBV-targeting guide sequence portion
  source 1..20: mol_type = other RNA
ctcattggaaaacaccctct

SEQ ID NO: 2825 - RNA, 20 nt, synthetic construct
  misc_feature 1..20: note = HBV-targeting guide sequence portion
  source 1..20: mol_type = other RNA
ctccaaaagacaccaaatac

SEQ ID NO: 2826 - RNA, 20 nt, synthetic construct
  misc_feature 1..20: note = HBV-targeting guide sequence portion
  source 1..20: mol_type = other RNA
ctccaaattctttatatggg

SEQ ID NO: 2827 - RNA, 20 nt, synthetic construct
  misc_feature 1..20: note = HBV-targeting guide sequence portion
  source 1..20: mol_type = other RNA
ctccaacaatccagattggg

SEQ ID NO: 2828 - RNA, 20 nt, synthetic construct
  misc_feature 1..20: note = HBV-targeting guide sequence portion
  source 1..20: mol_type = other RNA
ctccaacttgtcctggttat

SEQ ID NO: 2829 - RNA, 20 nt, synthetic construct
  misc_feature 1..20: note = HBV-targeting guide sequence portion
  source 1..20: mol_type = other RNA
ctccaagctgtgccttgggt

SEQ ID NO: 2830 - RNA, 20 nt, synthetic construct
  misc_feature 1..20: note = HBV-targeting guide sequence portion
  source 1..20: mol_type = other RNA
ctccaaggcatcccgataca

SEQ ID NO: 2831 - RNA, 20 nt, synthetic construct
  misc_feature 1..20: note = HBV-targeting guide sequence portion
  source 1..20: mol_type = other RNA
ctccaatcactcaccaacct

SEQ ID NO: 2832 - RNA, 20 nt, synthetic construct
  misc_feature 1..20: note = HBV-targeting guide sequence portion
  source 1..20: mol_type = other RNA
ctccacaaccttccaccaaa

SEQ ID NO: 2833 - RNA, 20 nt, synthetic construct
  misc_feature 1..20: note = HBV-targeting guide sequence portion
  source 1..20: mol_type = other RNA
ctccacagtagctccaaatt

SEQ ID NO: 2834 - RNA, 20 nt, synthetic construct
  misc_feature 1..20: note = HBV-targeting guide sequence portion
  source 1..20: mol_type = other RNA
ctccaccccaaaaggcctcc

SEQ ID NO: 2835 - RNA, 20 nt, synthetic construct
  misc_feature 1..20: note = HBV-targeting guide sequence portion
  source 1..20: mol_type = other RNA
ctccacctctgagaaacact

SEQ ID NO: 2836 - RNA, 20 nt, synthetic construct
  misc_feature 1..20: note = HBV-targeting guide sequence portion
  source 1..20: mol_type = other RNA
ctccagaccggctgcgagca

SEQ ID NO: 2837 - RNA, 20 nt, synthetic construct
  misc_feature 1..20: note = HBV-targeting guide sequence portion
  source 1..20: mol_type = other RNA
ctccagctcctaccttgttg

SEQ ID NO: 2838 - RNA, 20 nt, synthetic construct
  misc_feature 1..20: note = HBV-targeting guide sequence portion
  source 1..20: mol_type = other RNA
ctccagcttatagaccacca

SEQ ID NO: 2839 - RNA, 20 nt, synthetic construct
  misc_feature 1..20: note = HBV-targeting guide sequence portion
  source 1..20: mol_type = other RNA
ctccagttcaggaacagtaa

SEQ ID NO: 2840 - RNA, 20 nt, synthetic construct
  misc_feature 1..20: note = HBV-targeting guide sequence portion
  source 1..20: mol_type = other RNA
ctccatgcgacgtgcagagg

SEQ ID NO: 2841 - RNA, 20 nt, synthetic construct
  misc_feature 1..20: note = HBV-targeting guide sequence portion
  source 1..20: mol_type = other RNA
ctccatgttcagcgcagggt

SEQ ID NO: 2842 - RNA, 20 nt, synthetic construct
  misc_feature 1..20: note = HBV-targeting guide sequence portion
  source 1..20: mol_type = other RNA
ctcccagtctttaaacaaac

SEQ ID NO: 2843 - RNA, 20 nt, synthetic construct
  misc_feature 1..20: note = HBV-targeting guide sequence portion
  source 1..20: mol_type = other RNA
ctcccataggaattttccga

SEQ ID NO: 2844 - RNA, 20 nt, synthetic construct
  misc_feature 1..20: note = HBV-targeting guide sequence portion
  source 1..20: mol_type = other RNA
ctccccagcaaagaattgct

SEQ ID NO: 2845 - RNA, 20 nt, synthetic construct
  misc_feature 1..20: note = HBV-targeting guide sequence portion
  source 1..20: mol_type = other RNA
ctcccccaactcctcccagt

SEQ ID NO: 2846 - RNA, 20 nt, synthetic construct
  misc_feature 1..20: note = HBV-targeting guide sequence portion
  source 1..20: mol_type = other RNA
ctccccgtctgtgccttctc

SEQ ID NO: 2847 - RNA, 20 nt, synthetic construct
  misc_feature 1..20: note = HBV-targeting guide sequence portion
  source 1..20: mol_type = other RNA
ctcccgcaaatatacatcgt

SEQ ID NO: 2848 - RNA, 20 nt, synthetic construct
  misc_feature 1..20: note = HBV-targeting guide sequence portion
  source 1..20: mol_type = other RNA
ctcccggttaacaggcctat

SEQ ID NO: 2849 - RNA, 20 nt, synthetic construct
  misc_feature 1..20: note = HBV-targeting guide sequence portion
  source 1..20: mol_type = other RNA
ctccctcgcctcgcagacga

SEQ ID NO: 2850 - RNA, 20 nt, synthetic construct
  misc_feature 1..20: note = HBV-targeting guide sequence portion
  source 1..20: mol_type = other RNA
ctccctgctggtggctccag

SEQ ID NO: 2851 - RNA, 20 nt, synthetic construct
  misc_feature 1..20: note = HBV-targeting guide sequence portion
  source 1..20: mol_type = other RNA
ctccggaagtgttgatagga

SEQ ID NO: 2852 - RNA, 20 nt, synthetic construct
  misc_feature 1..20: note = HBV-targeting guide sequence portion
  source 1..20: mol_type = other RNA
ctccgtgcggtggggtgaac

SEQ ID NO: 2853 - RNA, 20 nt, synthetic construct
  misc_feature 1..20: note = HBV-targeting guide sequence portion
  source 1..20: mol_type = other RNA
ctcctaccttgttggcgtct

SEQ ID NO: 2854 - RNA, 20 nt, synthetic construct
  misc_feature 1..20: note = HBV-targeting guide sequence portion
  source 1..20: mol_type = other RNA
ctcctagccgcttgttttgc

SEQ ID NO: 2855 - RNA, 20 nt, synthetic construct
  misc_feature 1..20: note = HBV-targeting guide sequence portion
  source 1..20: mol_type = other RNA
ctcctagtacaaagatcatt

SEQ ID NO: 2856 - RNA, 20 nt, synthetic construct
  misc_feature 1..20: note = HBV-targeting guide sequence portion
  source 1..20: mol_type = other RNA
ctcctccagcttatagacca

SEQ ID NO: 2857 - RNA, 20 nt, synthetic construct
  misc_feature 1..20: note = HBV-targeting guide sequence portion
  source 1..20: mol_type = other RNA
ctcctcccagtctttaaaca

SEQ ID NO: 2858 - RNA, 20 nt, synthetic construct
  misc_feature 1..20: note = HBV-targeting guide sequence portion
  source 1..20: mol_type = other RNA
ctcctcccccaactcctccc

SEQ ID NO: 2859 - RNA, 20 nt, synthetic construct
  misc_feature 1..20: note = HBV-targeting guide sequence portion
  source 1..20: mol_type = other RNA
ctcctctgccgatccatact

SEQ ID NO: 2860 - RNA, 20 nt, synthetic construct
  misc_feature 1..20: note = HBV-targeting guide sequence portion
  source 1..20: mol_type = other RNA
ctcctgagcattgttcacct

SEQ ID NO: 2861 - RNA, 20 nt, synthetic construct
  misc_feature 1..20: note = HBV-targeting guide sequence portion
  source 1..20: mol_type = other RNA
ctcctgcctctaccaatcgc

SEQ ID NO: 2862 - RNA, 20 nt, synthetic construct
  misc_feature 1..20: note = HBV-targeting guide sequence portion
  source 1..20: mol_type = other RNA
ctcctgctcaaggaacctct

SEQ ID NO: 2863 - RNA, 20 nt, synthetic construct
  misc_feature 1..20: note = HBV-targeting guide sequence portion
  source 1..20: mol_type = other RNA
ctcctgtcctccaacttgtc

SEQ ID NO: 2864 - RNA, 20 nt, synthetic construct
  misc_feature 1..20: note = HBV-targeting guide sequence portion
  source 1..20: mol_type = other RNA
ctcctgttgctgtacaaaac

SEQ ID NO: 2865 - RNA, 20 nt, synthetic construct
  misc_feature 1..20: note = HBV-targeting guide sequence portion
  source 1..20: mol_type = other RNA
ctcgagaagattgacgatat

SEQ ID NO: 2866 - RNA, 20 nt, synthetic construct
  misc_feature 1..20: note = HBV-targeting guide sequence portion
  source 1..20: mol_type = other RNA
ctcgagatgggtcgtccgcg

SEQ ID NO: 2867 - RNA, 20 nt, synthetic construct
  misc_feature 1..20: note = HBV-targeting guide sequence portion
  source 1..20: mol_type = other RNA
ctcgaggattggggaccctg

SEQ ID NO: 2868 - RNA, 20 nt, synthetic construct
  misc_feature 1..20: note = HBV-targeting guide sequence portion
  source 1..20: mol_type = other RNA
ctcgaggccgcttggggccc

SEQ ID NO: 2869 - RNA, 20 nt, synthetic construct
  misc_feature 1..20: note = HBV-targeting guide sequence portion
  source 1..20: mol_type = other RNA
ctcgcagacgaagatctcaa

SEQ ID NO: 2870 - RNA, 20 nt, synthetic construct
  misc_feature 1..20: note = HBV-targeting guide sequence portion
  source 1..20: mol_type = other RNA
ctcgcagccggtctggagca

SEQ ID NO: 2871 - RNA, 20 nt, synthetic construct
  misc_feature 1..20: note = HBV-targeting guide sequence portion
  source 1..20: mol_type = other RNA
ctcgcctcgcagacgaagat

SEQ ID NO: 2872 - RNA, 20 nt, synthetic construct
  misc_feature 1..20: note = HBV-targeting guide sequence portion
  source 1..20: mol_type = other RNA
ctcgggactgacaactctgt

SEQ ID NO: 2873 - RNA, 20 nt, synthetic construct
  misc_feature 1..20: note = HBV-targeting guide sequence portion
  source 1..20: mol_type = other RNA
ctcggggatctcaatgttag

SEQ ID NO: 2874 - RNA, 20 nt, synthetic construct
  misc_feature 1..20: note = HBV-targeting guide sequence portion
  source 1..20: mol_type = other RNA
ctcgtacggaaggaaagaag

SEQ ID NO: 2875 - RNA, 20 nt, synthetic construct
  misc_feature 1..20: note = HBV-targeting guide sequence portion
  source 1..20: mol_type = other RNA
ctcgtcgtctaacaacacaa

SEQ ID NO: 2876 - RNA, 20 nt, synthetic construct
  misc_feature 1..20: note = HBV-targeting guide sequence portion
  source 1..20: mol_type = other RNA
ctcgtggtggacttctctca

SEQ ID NO: 2877 - RNA, 20 nt, synthetic construct
  misc_feature 1..20: note = HBV-targeting guide sequence portion
  source 1..20: mol_type = other RNA
ctcgtgttacaggcggggtt

SEQ ID NO: 2878 - RNA, 20 nt, synthetic construct
  misc_feature 1..20: note = HBV-targeting guide sequence portion
  source 1..20: mol_type = other RNA
ctcgtttttgccttctgact

SEQ ID NO: 2879 - RNA, 20 nt, synthetic construct
  misc_feature 1..20: note = HBV-targeting guide sequence portion
  source 1..20: mol_type = other RNA
ctctaattccaggatcatca

SEQ ID NO: 2880 - RNA, 20 nt, synthetic construct
  misc_feature 1..20: note = HBV-targeting guide sequence portion
  source 1..20: mol_type = other RNA
ctctaccaatcgccagtcag

SEQ ID NO: 2881 - RNA, 20 nt, synthetic construct
  misc_feature 1..20: note = HBV-targeting guide sequence portion
  source 1..20: mol_type = other RNA
ctctagctacctgggtgggt

SEQ ID NO: 2882 - RNA, 20 nt, synthetic construct
  misc_feature 1..20: note = HBV-targeting guide sequence portion
  source 1..20: mol_type = other RNA
ctctaggaccgtttctcttc

SEQ ID NO: 2883 - RNA, 20 nt, synthetic construct
  misc_feature 1..20: note = HBV-targeting guide sequence portion
  source 1..20: mol_type = other RNA
ctctatggaaggcgggtgtt

SEQ ID NO: 2884 - RNA, 20 nt, synthetic construct
  misc_feature 1..20: note = HBV-targeting guide sequence portion
  source 1..20: mol_type = other RNA
ctctatgtatccctcctgtt

SEQ ID NO: 2885 - RNA, 20 nt, synthetic construct
  misc_feature 1..20: note = HBV-targeting guide sequence portion
  source 1..20: mol_type = other RNA
ctctcaattttctaggggga

SEQ ID NO: 2886 - RNA, 20 nt, synthetic construct
  misc_feature 1..20: note = HBV-targeting guide sequence portion
  source 1..20: mol_type = other RNA
ctctcacatatcgtcaatct

SEQ ID NO: 2887 - RNA, 20 nt, synthetic construct
  misc_feature 1..20: note = HBV-targeting guide sequence portion
  source 1..20: mol_type = other RNA
ctctcactctgggatcttgc

SEQ ID NO: 2888 - RNA, 20 nt, synthetic construct
  misc_feature 1..20: note = HBV-targeting guide sequence portion
  source 1..20: mol_type = other RNA
ctctcccgcaaatatacatc

SEQ ID NO: 2889 - RNA, 20 nt, synthetic construct
  misc_feature 1..20: note = HBV-targeting guide sequence portion
  source 1..20: mol_type = other RNA
ctctcgtttttgccttctga

SEQ ID NO: 2890 - RNA, 20 nt, synthetic construct
  misc_feature 1..20: note = HBV-targeting guide sequence portion
  source 1..20: mol_type = other RNA
ctctctgcaatgtcaacgac

SEQ ID NO: 2891 - RNA, 20 nt, synthetic construct
  misc_feature 1..20: note = HBV-targeting guide sequence portion
  source 1..20: mol_type = other RNA
ctctcttatataaaacaccc

SEQ ID NO: 2892 - RNA, 20 nt, synthetic construct
  misc_feature 1..20: note = HBV-targeting guide sequence portion
  source 1..20: mol_type = other RNA
ctctctttacgcggactccc

SEQ ID NO: 2893 - RNA, 20 nt, synthetic construct
  misc_feature 1..20: note = HBV-targeting guide sequence portion
  source 1..20: mol_type = other RNA
ctctgaaggctgggtccaac

SEQ ID NO: 2894 - RNA, 20 nt, synthetic construct
  misc_feature 1..20: note = HBV-targeting guide sequence portion
  source 1..20: mol_type = other RNA
ctctgagaaacactcatcct

SEQ ID NO: 2895 - RNA, 20 nt, synthetic construct
  misc_feature 1..20: note = HBV-targeting guide sequence portion
  source 1..20: mol_type = other RNA
ctctgcaagatcccagagtg

SEQ ID NO: 2896 - RNA, 20 nt, synthetic construct
  misc_feature 1..20: note = HBV-targeting guide sequence portion
  source 1..20: mol_type = other RNA
ctctgcaatgtcaacgaccg

SEQ ID NO: 2897 - RNA, 20 nt, synthetic construct
  misc_feature 1..20: note = HBV-targeting guide sequence portion
  source 1..20: mol_type = other RNA
ctctgcacgtcgcatggaga

SEQ ID NO: 2898 - RNA, 20 nt, synthetic construct
  misc_feature 1..20: note = HBV-targeting guide sequence portion
  source 1..20: mol_type = other RNA
ctctgccgatccatactgcg

SEQ ID NO: 2899 - RNA, 20 nt, synthetic construct
  misc_feature 1..20: note = HBV-targeting guide sequence portion
  source 1..20: mol_type = other RNA
ctctgcctaatcatctcttg

SEQ ID NO: 2900 - RNA, 20 nt, synthetic construct
  misc_feature 1..20: note = HBV-targeting guide sequence portion
  source 1..20: mol_type = other RNA
ctctgcctgccgttccgacc

SEQ ID NO: 2901 - RNA, 20 nt, synthetic construct
  misc_feature 1..20: note = HBV-targeting guide sequence portion
  source 1..20: mol_type = other RNA
ctctgcggtattgtgaggat

SEQ ID NO: 2902 - RNA, 20 nt, synthetic construct
  misc_feature 1..20: note = HBV-targeting guide sequence portion
  source 1..20: mol_type = other RNA
ctctgggatcttgcagagtt

SEQ ID NO: 2903 - RNA, 20 nt, synthetic construct
  misc_feature 1..20: note = HBV-targeting guide sequence portion
  source 1..20: mol_type = other RNA
ctctgggattctttcccgac

SEQ ID NO: 2904 - RNA, 20 nt, synthetic construct
  misc_feature 1..20: note = HBV-targeting guide sequence portion
  source 1..20: mol_type = other RNA
ctctgtatcgggatgccttg

SEQ ID NO: 2905 - RNA, 20 nt, synthetic construct
  misc_feature 1..20: note = HBV-targeting guide sequence portion
  source 1..20: mol_type = other RNA
ctctgttgtcctctcccgca

SEQ ID NO: 2906 - RNA, 20 nt, synthetic construct
  misc_feature 1..20: note = HBV-targeting guide sequence portion
  source 1..20: mol_type = other RNA
ctcttaatttcatgggctat

SEQ ID NO: 2907 - RNA, 20 nt, synthetic construct
  misc_feature 1..20: note = HBV-targeting guide sequence portion
  source 1..20: mol_type = other RNA
ctcttatataaaacacccgc

SEQ ID NO: 2908 - RNA, 20 nt, synthetic construct
  misc_feature 1..20: note = HBV-targeting guide sequence portion
  source 1..20: mol_type = other RNA
ctcttatgtaagaccttggg

SEQ ID NO: 2909 - RNA, 20 nt, synthetic construct
  misc_feature 1..20: note = HBV-targeting guide sequence portion
  source 1..20: mol_type = other RNA
ctcttcatcctgctgctatg

SEQ ID NO: 2910 - RNA, 20 nt, synthetic construct
  misc_feature 1..20: note = HBV-targeting guide sequence portion
  source 1..20: mol_type = other RNA
ctcttccaaaagtaagacaa

SEQ ID NO: 2911 - RNA, 20 nt, synthetic construct
  misc_feature 1..20: note = HBV-targeting guide sequence portion
  source 1..20: mol_type = other RNA
ctcttctctgcctgccgttc

SEQ ID NO: 2912 - RNA, 20 nt, synthetic construct
  misc_feature 1..20: note = HBV-targeting guide sequence portion
  source 1..20: mol_type = other RNA
ctcttggactctctgcaatg

SEQ ID NO: 2913 - RNA, 20 nt, synthetic construct
  misc_feature 1..20: note = HBV-targeting guide sequence portion
  source 1..20: mol_type = other RNA
ctcttggctcagtttactag

SEQ ID NO: 2914 - RNA, 20 nt, synthetic construct
  misc_feature 1..20: note = HBV-targeting guide sequence portion
  source 1..20: mol_type = other RNA
ctcttgttcatgtcctactg

SEQ ID NO: 2915 - RNA, 20 nt, synthetic construct
  misc_feature 1..20: note = HBV-targeting guide sequence portion
  source 1..20: mol_type = other RNA
ctcttgttcccaagaatatg

SEQ ID NO: 2916 - RNA, 20 nt, synthetic construct
  misc_feature 1..20: note = HBV-targeting guide sequence portion
  source 1..20: mol_type = other RNA
ctctttacgcggactccccg

SEQ ID NO: 2917 - RNA, 20 nt, synthetic construct
  misc_feature 1..20: note = HBV-targeting guide sequence portion
  source 1..20: mol_type = other RNA
ctctttgttttgttagggtt

SEQ ID NO: 2918 - RNA, 20 nt, synthetic construct
  misc_feature 1..20: note = HBV-targeting guide sequence portion
  source 1..20: mol_type = other RNA
ctcttttcctaatatacatc

SEQ ID NO: 2919 - RNA, 20 nt, synthetic construct
  misc_feature 1..20: note = HBV-targeting guide sequence portion
  source 1..20: mol_type = other RNA
ctgaaacattctttgatttt

SEQ ID NO: 2920 - RNA, 20 nt, synthetic construct
  misc_feature 1..20: note = HBV-targeting guide sequence portion
  source 1..20: mol_type = other RNA
ctgaaagccaaacagtgggg

SEQ ID NO: 2921 - RNA, 20 nt, synthetic construct
  misc_feature 1..20: note = HBV-targeting guide sequence portion
  source 1..20: mol_type = other RNA
ctgaacaaatggcactagta

SEQ ID NO: 2922 - RNA, 20 nt, synthetic construct
  misc_feature 1..20: note = HBV-targeting guide sequence portion
  source 1..20: mol_type = other RNA
ctgaacatggagaacatcac

SEQ ID NO: 2923 - RNA, 20 nt, synthetic construct
  misc_feature 1..20: note = HBV-targeting guide sequence portion
  source 1..20: mol_type = other RNA
ctgaacctttaccccgttgc

SEQ ID NO: 2924 - RNA, 20 nt, synthetic construct
  misc_feature 1..20: note = HBV-targeting guide sequence portion
  source 1..20: mol_type = other RNA
ctgaactggagccaccagca

SEQ ID NO: 2925 - RNA, 20 nt, synthetic construct
  misc_feature 1..20: note = HBV-targeting guide sequence portion
  source 1..20: mol_type = other RNA
ctgaactttaggcccatatg

SEQ ID NO: 2926 - RNA, 20 nt, synthetic construct
  misc_feature 1..20: note = HBV-targeting guide sequence portion
  source 1..20: mol_type = other RNA
ctgaaggctgggtccaactg

SEQ ID NO: 2927 - RNA, 20 nt, synthetic construct
  misc_feature 1..20: note = HBV-targeting guide sequence portion
  source 1..20: mol_type = other RNA
ctgaatcccgcggacgaccc

SEQ ID NO: 2928 - RNA, 20 nt, synthetic construct
  misc_feature 1..20: note = HBV-targeting guide sequence portion
  source 1..20: mol_type = other RNA
ctgacaactctgttgtcctc

SEQ ID NO: 2929 - RNA, 20 nt, synthetic construct
  misc_feature 1..20: note = HBV-targeting guide sequence portion
  source 1..20: mol_type = other RNA
ctgactactaggtccctaga

SEQ ID NO: 2930 - RNA, 20 nt, synthetic construct
  misc_feature 1..20: note = HBV-targeting guide sequence portion
  source 1..20: mol_type = other RNA
ctgactggcgattggtagag

SEQ ID NO: 2931 - RNA, 20 nt, synthetic construct
  misc_feature 1..20: note = HBV-targeting guide sequence portion
  source 1..20: mol_type = other RNA
ctgacttctttccttccgta

SEQ ID NO: 2932 - RNA, 20 nt, synthetic construct
  misc_feature 1..20: note = HBV-targeting guide sequence portion
  source 1..20: mol_type = other RNA
ctgagaaacactcatcctca

SEQ ID NO: 2933 - RNA, 20 nt, synthetic construct
  misc_feature 1..20: note = HBV-targeting guide sequence portion
  source 1..20: mol_type = other RNA
ctgagcattgttcacctcac

SEQ ID NO: 2934 - RNA, 20 nt, synthetic construct
  misc_feature 1..20: note = HBV-targeting guide sequence portion
  source 1..20: mol_type = other RNA
ctgagccaagagaaacgggc

SEQ ID NO: 2935 - RNA, 20 nt, synthetic construct
  misc_feature 1..20: note = HBV-targeting guide sequence portion
  source 1..20: mol_type = other RNA
ctgagcctgagggctccacc

SEQ ID NO: 2936 - RNA, 20 nt, synthetic construct
  misc_feature 1..20: note = HBV-targeting guide sequence portion
  source 1..20: mol_type = other RNA
ctgaggatgagtgtttctca

SEQ ID NO: 2937 - RNA, 20 nt, synthetic construct
  misc_feature 1..20: note = HBV-targeting guide sequence portion
  source 1..20: mol_type = other RNA
ctgaggcccactcccatagg

SEQ ID NO: 2938 - RNA, 20 nt, synthetic construct
  misc_feature 1..20: note = HBV-targeting guide sequence portion
  source 1..20: mol_type = other RNA
ctgagggctccaccccaaaa

SEQ ID NO: 2939 - RNA, 20 nt, synthetic construct
  misc_feature 1..20: note = HBV-targeting guide sequence portion
  source 1..20: mol_type = other RNA
ctgagtgcagtatggtgagg

SEQ ID NO: 2940 - RNA, 20 nt, synthetic construct
  misc_feature 1..20: note = HBV-targeting guide sequence portion
  source 1..20: mol_type = other RNA
ctgatgcaacccccactggt

SEQ ID NO: 2941 - RNA, 20 nt, synthetic construct
  misc_feature 1..20: note = HBV-targeting guide sequence portion
  source 1..20: mol_type = other RNA
ctgatggcctatgaccaagc

SEQ ID NO: 2942 - RNA, 20 nt, synthetic construct
  misc_feature 1..20: note = HBV-targeting guide sequence portion
  source 1..20: mol_type = other RNA
ctgatgtgatgttctccatg

SEQ ID NO: 2943 - RNA, 20 nt, synthetic construct
  misc_feature 1..20: note = HBV-targeting guide sequence portion
  source 1..20: mol_type = other RNA
ctgcaagatcccagagtgag

SEQ ID NO: 2944 - RNA, 20 nt, synthetic construct
  misc_feature 1..20: note = HBV-targeting guide sequence portion
  source 1..20: mol_type = other RNA
ctgcaatgtcaacgaccgac

SEQ ID NO: 2945 - RNA, 20 nt, synthetic construct
  misc_feature 1..20: note = HBV-targeting guide sequence portion
  source 1..20: mol_type = other RNA
ctgcacctgtattcccatcc

SEQ ID NO: 2946 - RNA, 20 nt, synthetic construct
  misc_feature 1..20: note = HBV-targeting guide sequence portion
  source 1..20: mol_type = other RNA
ctgcacgactcctgctcaag

SEQ ID NO: 2947 - RNA, 20 nt, synthetic construct
  misc_feature 1..20: note = HBV-targeting guide sequence portion
  source 1..20: mol_type = other RNA
ctgcacgtcgcatggagacc

SEQ ID NO: 2948 - RNA, 20 nt, synthetic construct
  misc_feature 1..20: note = HBV-targeting guide sequence portion
  source 1..20: mol_type = other RNA
ctgcactcaggcaagcaatt

SEQ ID NO: 2949 - RNA, 20 nt, synthetic construct
  misc_feature 1..20: note = HBV-targeting guide sequence portion
  source 1..20: mol_type = other RNA
ctgcagaacctgcacgactc

SEQ ID NO: 2950 - RNA, 20 nt, synthetic construct
  misc_feature 1..20: note = HBV-targeting guide sequence portion
  source 1..20: mol_type = other RNA
ctgcagggtcccgtgctggt

SEQ ID NO: 2951 - RNA, 20 nt, synthetic construct
  misc_feature 1..20: note = HBV-targeting guide sequence portion
  source 1..20: mol_type = other RNA
ctgcatggcctgaggatgag

SEQ ID NO: 2952 - RNA, 20 nt, synthetic construct
  misc_feature 1..20: note = HBV-targeting guide sequence portion
  source 1..20: mol_type = other RNA
ctgccaactggatcctgcgc

SEQ ID NO: 2953 - RNA, 20 nt, synthetic construct
  misc_feature 1..20: note = HBV-targeting guide sequence portion
  source 1..20: mol_type = other RNA
ctgccccatgctgtagctct

SEQ ID NO: 2954 - RNA, 20 nt, synthetic construct
  misc_feature 1..20: note = HBV-targeting guide sequence portion
  source 1..20: mol_type = other RNA
ctgccccttttacacaatgt

SEQ ID NO: 2955 - RNA, 20 nt, synthetic construct
  misc_feature 1..20: note = HBV-targeting guide sequence portion
  source 1..20: mol_type = other RNA
ctgccgatccatactgcgga

SEQ ID NO: 2956 - RNA, 20 nt, synthetic construct
  misc_feature 1..20: note = HBV-targeting guide sequence portion
  source 1..20: mol_type = other RNA
ctgccggaccgtgtgcactt

SEQ ID NO: 2957 - RNA, 20 nt, synthetic construct
  misc_feature 1..20: note = HBV-targeting guide sequence portion
  source 1..20: mol_type = other RNA
ctgccgtcctgactggcgat

SEQ ID NO: 2958 - RNA, 20 nt, synthetic construct
  misc_feature 1..20: note = HBV-targeting guide sequence portion
  source 1..20: mol_type = other RNA
ctgccgttccgaccgaccac

SEQ ID NO: 2959 - RNA, 20 nt, synthetic construct
  misc_feature 1..20: note = HBV-targeting guide sequence portion
  source 1..20: mol_type = other RNA
ctgcctaatcatctcttgtt

SEQ ID NO: 2960 - RNA, 20 nt, synthetic construct
  misc_feature 1..20: note = HBV-targeting guide sequence portion
  source 1..20: mol_type = other RNA
ctgcctcgtcgtctaacaac

SEQ ID NO: 2961 - RNA, 20 nt, synthetic construct
  misc_feature 1..20: note = HBV-targeting guide sequence portion
  source 1..20: mol_type = other RNA
ctgcctctaccaatcgccag

SEQ ID NO: 2962 - RNA, 20 nt, synthetic construct
  misc_feature 1..20: note = HBV-targeting guide sequence portion
  source 1..20: mol_type = other RNA
ctgcctctcacatatcgtca

SEQ ID NO: 2963 - RNA, 20 nt, synthetic construct
  misc_feature 1..20: note = HBV-targeting guide sequence portion
  source 1..20: mol_type = other RNA
ctgcctgccgttccgaccga

SEQ ID NO: 2964 - RNA, 20 nt, synthetic construct
  misc_feature 1..20: note = HBV-targeting guide sequence portion
  source 1..20: mol_type = other RNA
ctgcgaattttggccaagac

SEQ ID NO: 2965 - RNA, 20 nt, synthetic construct
  misc_feature 1..20: note = HBV-targeting guide sequence portion
  source 1..20: mol_type = other RNA
ctgcgacgcggcgattgaga

SEQ ID NO: 2966 - RNA, 20 nt, synthetic construct
  misc_feature 1..20: note = HBV-targeting guide sequence portion
  source 1..20: mol_type = other RNA
ctgcgagcaaaacaagcggc

SEQ ID NO: 2967 - RNA, 20 nt, synthetic construct
  misc_feature 1..20: note = HBV-targeting guide sequence portion
  source 1..20: mol_type = other RNA
ctgcgaggcgagggagttct

SEQ ID NO: 2968 - RNA, 20 nt, synthetic construct
  misc_feature 1..20: note = HBV-targeting guide sequence portion
  source 1..20: mol_type = other RNA
ctgcgcaccagcaccatgca

SEQ ID NO: 2969 - RNA, 20 nt, synthetic construct
  misc_feature 1..20: note = HBV-targeting guide sequence portion
  source 1..20: mol_type = other RNA
ctgcgcgggacgtcctttgt

SEQ ID NO: 2970 - RNA, 20 nt, synthetic construct
  misc_feature 1..20: note = HBV-targeting guide sequence portion
  source 1..20: mol_type = other RNA
ctgcgctgaacatggagaac

SEQ ID NO: 2971 - RNA, 20 nt, synthetic construct
  misc_feature 1..20: note = HBV-targeting guide sequence portion
  source 1..20: mol_type = other RNA
ctgcggaactcctagccgct

SEQ ID NO: 2972 - RNA, 20 nt, synthetic construct
  misc_feature 1..20: note = HBV-targeting guide sequence portion
  source 1..20: mol_type = other RNA
ctgcggcggtatctagaaga

SEQ ID NO: 2973 - RNA, 20 nt, synthetic construct
  misc_feature 1..20: note = HBV-targeting guide sequence portion
  source 1..20: mol_type = other RNA
ctgcggcgttttatcatctt

SEQ ID NO: 2974 - RNA, 20 nt, synthetic construct
  misc_feature 1..20: note = HBV-targeting guide sequence portion
  source 1..20: mol_type = other RNA
ctgcggtattgtgaggattc

SEQ ID NO: 2975 - RNA, 20 nt, synthetic construct
  misc_feature 1..20: note = HBV-targeting guide sequence portion
  source 1..20: mol_type = other RNA
ctgctaggctgtgctgccaa

SEQ ID NO: 2976 - RNA, 20 nt, synthetic construct
  misc_feature 1..20: note = HBV-targeting guide sequence portion
  source 1..20: mol_type = other RNA
ctgctaggttttatcctaaa

SEQ ID NO: 2977 - RNA, 20 nt, synthetic construct
  misc_feature 1..20: note = HBV-targeting guide sequence portion
  source 1..20: mol_type = other RNA
ctgctatgcctcatcttctt

SEQ ID NO: 2978 - RNA, 20 nt, synthetic construct
  misc_feature 1..20: note = HBV-targeting guide sequence portion
  source 1..20: mol_type = other RNA
ctgctcaaggaacctctatg

SEQ ID NO: 2979 - RNA, 20 nt, synthetic construct
  misc_feature 1..20: note = HBV-targeting guide sequence portion
  source 1..20: mol_type = other RNA
ctgctcgtgttacaggcggg

SEQ ID NO: 2980 - RNA, 20 nt, synthetic construct
  misc_feature 1..20: note = HBV-targeting guide sequence portion
  source 1..20: mol_type = other RNA
ctgctgctatgcctcatctt

SEQ ID NO: 2981 - RNA, 20 nt, synthetic construct
  misc_feature 1..20: note = HBV-targeting guide sequence portion
  source 1..20: mol_type = other RNA
ctgctggtggctccagttca

SEQ ID NO: 2982 - RNA, 20 nt, synthetic construct
  misc_feature 1..20: note = HBV-targeting guide sequence portion
  source 1..20: mol_type = other RNA
ctgcttagattgaatacatg

SEQ ID NO: 2983 - RNA, 20 nt, synthetic construct
  misc_feature 1..20: note = HBV-targeting guide sequence portion
  source 1..20: mol_type = other RNA
ctgctttaatgcccttgtat

SEQ ID NO: 2984 - RNA, 20 nt, synthetic construct
  misc_feature 1..20: note = HBV-targeting guide sequence portion
  source 1..20: mol_type = other RNA
ctggaattagaggacagacg

SEQ ID NO: 2985 - RNA, 20 nt, synthetic construct
  misc_feature 1..20: note = HBV-targeting guide sequence portion
  source 1..20: mol_type = other RNA
ctggactatcaaggtatgtt

SEQ ID NO: 2986 - RNA, 20 nt, synthetic construct
  misc_feature 1..20: note = HBV-targeting guide sequence portion
  source 1..20: mol_type = other RNA
ctggagcaaacattctcggg

SEQ ID NO: 2987 - RNA, 20 nt, synthetic construct
  misc_feature 1..20: note = HBV-targeting guide sequence portion
  source 1..20: mol_type = other RNA
ctggagcattcgggctaggg

SEQ ID NO: 2988 - RNA, 20 nt, synthetic construct
  misc_feature 1..20: note = HBV-targeting guide sequence portion
  source 1..20: mol_type = other RNA
ctggagccaccagcagggag

SEQ ID NO: 2989 - RNA, 20 nt, synthetic construct
  misc_feature 1..20: note = HBV-targeting guide sequence portion
  source 1..20: mol_type = other RNA
ctggaggagtgcgaatccac

SEQ ID NO: 2990 - RNA, 20 nt, synthetic construct
  misc_feature 1..20: note = HBV-targeting guide sequence portion
  source 1..20: mol_type = other RNA
ctggataataaggtttaata

SEQ ID NO: 2991 - RNA, 20 nt, synthetic construct
  misc_feature 1..20: note = HBV-targeting guide sequence portion
  source 1..20: mol_type = other RNA
ctggatcctgcgcgggacgt

SEQ ID NO: 2992 - RNA, 20 nt, synthetic construct
  misc_feature 1..20: note = HBV-targeting guide sequence portion
  source 1..20: mol_type = other RNA
ctggatgtgtctgcggcgtt

SEQ ID NO: 2993 - RNA, 20 nt, synthetic construct
  misc_feature 1..20: note = HBV-targeting guide sequence portion
  source 1..20: mol_type = other RNA
ctggattgttggagtttgct

SEQ ID NO: 2994 - RNA, 20 nt, synthetic construct
  misc_feature 1..20: note = HBV-targeting guide sequence portion
  source 1..20: mol_type = other RNA
ctggcaacggggtaaaggtt

SEQ ID NO: 2995 - RNA, 20 nt, synthetic construct
  misc_feature 1..20: note = HBV-targeting guide sequence portion
  source 1..20: mol_type = other RNA
ctggcaaggtttgcattatg

SEQ ID NO: 2996 - RNA, 20 nt, synthetic construct
  misc_feature 1..20: note = HBV-targeting guide sequence portion
  source 1..20: mol_type = other RNA
ctggccagacgccaacaagg

SEQ ID NO: 2997 - RNA, 20 nt, synthetic construct
  misc_feature 1..20: note = HBV-targeting guide sequence portion
  source 1..20: mol_type = other RNA
ctggccagggatccttgttg

SEQ ID NO: 2998 - RNA, 20 nt, synthetic construct
  misc_feature 1..20: note = HBV-targeting guide sequence portion
  source 1..20: mol_type = other RNA
ctggccgttgcctggcaacg

SEQ ID NO: 2999 - RNA, 20 nt, synthetic construct
  misc_feature 1..20: note = HBV-targeting guide sequence portion
  source 1..20: mol_type = other RNA
ctggcgattggtagaggcag

SEQ ID NO: 3000 - RNA, 20 nt, synthetic construct
  misc_feature 1..20: note = HBV-targeting guide sequence portion
  source 1..20: mol_type = other RNA
ctgggaggagttgggggagg

SEQ ID NO: 3001 - RNA, 20 nt, synthetic construct
  misc_feature 1..20: note = HBV-targeting guide sequence portion
  source 1..20: mol_type = other RNA
ctgggatcttgcagagtttg

SEQ ID NO: 3002 - RNA, 20 nt, synthetic construct
  misc_feature 1..20: note = HBV-targeting guide sequence portion
  source 1..20: mol_type = other RNA
ctgggattctttcccgacca

SEQ ID NO: 3003 - RNA, 20 nt, synthetic construct
  misc_feature 1..20: note = HBV-targeting guide sequence portion
  source 1..20: mol_type = other RNA
ctgggctttcggaaaattcc

SEQ ID NO: 3004 - RNA, 20 nt, synthetic construct
  misc_feature 1..20: note = HBV-targeting guide sequence portion
  source 1..20: mol_type = other RNA
ctggggagaactaatgactc

SEQ ID NO: 3005 - RNA, 20 nt, synthetic construct
  misc_feature 1..20: note = HBV-targeting guide sequence portion
  source 1..20: mol_type = other RNA
ctgggtccaactggtggtcg

SEQ ID NO: 3006 - RNA, 20 nt, synthetic construct
  misc_feature 1..20: note = HBV-targeting guide sequence portion
  source 1..20: mol_type = other RNA
ctgggtgggtactaatttag

SEQ ID NO: 3007 - RNA, 20 nt, synthetic construct
  misc_feature 1..20: note = HBV-targeting guide sequence portion
  source 1..20: mol_type = other RNA
ctgggttttgctgccccttt

SEQ ID NO: 3008 - RNA, 20 nt, synthetic construct
  misc_feature 1..20: note = HBV-targeting guide sequence portion
  source 1..20: mol_type = other RNA
ctggtgcgcagaccaattta

SEQ ID NO: 3009 - RNA, 20 nt, synthetic construct
  misc_feature 1..20: note = HBV-targeting guide sequence portion
  source 1..20: mol_type = other RNA
ctggtggaaagattctgccc

SEQ ID NO: 3010 - RNA, 20 nt, synthetic construct
  misc_feature 1..20: note = HBV-targeting guide sequence portion
  source 1..20: mol_type = other RNA
ctggtggctccagttcagga

SEQ ID NO: 3011 - RNA, 20 nt, synthetic construct
  misc_feature 1..20: note = HBV-targeting guide sequence portion
  source 1..20: mol_type = other RNA
ctggtggtcgggaaagaatc

SEQ ID NO: 3012 - RNA, 20 nt, synthetic construct
  misc_feature 1..20: note = HBV-targeting guide sequence portion
  source 1..20: mol_type = other RNA
ctggtggttgatgatcctgg

SEQ ID NO: 3013 - RNA, 20 nt, synthetic construct
  misc_feature 1..20: note = HBV-targeting guide sequence portion
  source 1..20: mol_type = other RNA
ctggttatcgctggatgtgt

SEQ ID NO: 3014 - RNA, 20 nt, synthetic construct
  misc_feature 1..20: note = HBV-targeting guide sequence portion
  source 1..20: mol_type = other RNA
ctggttggggcttggtcata

SEQ ID NO: 3015 - RNA, 20 nt, synthetic construct
  misc_feature 1..20: note = HBV-targeting guide sequence portion
  source 1..20: mol_type = other RNA
ctgtaacacgagcaggggtc

SEQ ID NO: 3016 - RNA, 20 nt, synthetic construct
  misc_feature 1..20: note = HBV-targeting guide sequence portion
  source 1..20: mol_type = other RNA
ctgtaagcgggcctacaaac

SEQ ID NO: 3017 - RNA, 20 nt, synthetic construct
  misc_feature 1..20: note = HBV-targeting guide sequence portion
  source 1..20: mol_type = other RNA
ctgtacaaaaccttcggatg

SEQ ID NO: 3018 - RNA, 20 nt, synthetic construct
  misc_feature 1..20: note = HBV-targeting guide sequence portion
  source 1..20: mol_type = other RNA
ctgtacagacttggccccca

SEQ ID NO: 3019 - RNA, 20 nt, synthetic construct
  misc_feature 1..20: note = HBV-targeting guide sequence portion
  source 1..20: mol_type = other RNA
ctgtacagcatcttgagtcc

SEQ ID NO: 3020 - RNA, 20 nt, synthetic construct
  misc_feature 1..20: note = HBV-targeting guide sequence portion
  source 1..20: mol_type = other RNA
ctgtacctgtctttaaccct

SEQ ID NO: 3021 - RNA, 20 nt, synthetic construct
  misc_feature 1..20: note = HBV-targeting guide sequence portion
  source 1..20: mol_type = other RNA
ctgtagctcttgttcccaag

SEQ ID NO: 3022 - RNA, 20 nt, synthetic construct
  misc_feature 1..20: note = HBV-targeting guide sequence portion
  source 1..20: mol_type = other RNA
ctgtaggcataaattggtct

SEQ ID NO: 3023 - RNA, 20 nt, synthetic construct
  misc_feature 1..20: note = HBV-targeting guide sequence portion
  source 1..20: mol_type = other RNA
ctgtatcgggatgccttgga

SEQ ID NO: 3024 - RNA, 20 nt, synthetic construct
  misc_feature 1..20: note = HBV-targeting guide sequence portion
  source 1..20: mol_type = other RNA
ctgtatctccctgctggtgg

SEQ ID NO: 3025 - RNA, 20 nt, synthetic construct
  misc_feature 1..20: note = HBV-targeting guide sequence portion
  source 1..20: mol_type = other RNA
ctgtattcccatcccatcat

SEQ ID NO: 3026 - RNA, 20 nt, synthetic construct
  misc_feature 1..20: note = HBV-targeting guide sequence portion
  source 1..20: mol_type = other RNA
ctgtcctccaacttgtcctg

SEQ ID NO: 3027 - RNA, 20 nt, synthetic construct
  misc_feature 1..20: note = HBV-targeting guide sequence portion
  source 1..20: mol_type = other RNA
ctgtcctctaattccaggat

SEQ ID NO: 3028 - RNA, 20 nt, synthetic construct
  misc_feature 1..20: note = HBV-targeting guide sequence portion
  source 1..20: mol_type = other RNA
ctgtcgtcctcttctctgcc

SEQ ID NO: 3029 - RNA, 20 nt, synthetic construct
  misc_feature 1..20: note = HBV-targeting guide sequence portion
  source 1..20: mol_type = other RNA
ctgtctccacctctgagaaa

SEQ ID NO: 3030 - RNA, 20 nt, synthetic construct
  misc_feature 1..20: note = HBV-targeting guide sequence portion
  source 1..20: mol_type = other RNA
ctgtctttaaccctcattgg

SEQ ID NO: 3031 - RNA, 20 nt, synthetic construct
  misc_feature 1..20: note = HBV-targeting guide sequence portion
  source 1..20: mol_type = other RNA
ctgtgccaagtgtttgctga

SEQ ID NO: 3032 - RNA, 20 nt, synthetic construct
  misc_feature 1..20: note = HBV-targeting guide sequence portion
  source 1..20: mol_type = other RNA
ctgtgccttctcatctgccg

SEQ ID NO: 3033 - RNA, 20 nt, synthetic construct
  misc_feature 1..20: note = HBV-targeting guide sequence portion
  source 1..20: mol_type = other RNA
ctgtgccttgggtggcttta

SEQ ID NO: 3034 - RNA, 20 nt, synthetic construct
  misc_feature 1..20: note = HBV-targeting guide sequence portion
  source 1..20: mol_type = other RNA
ctgtgctgccaactggatcc

SEQ ID NO: 3035 - RNA, 20 nt, synthetic construct
  misc_feature 1..20: note = HBV-targeting guide sequence portion
  source 1..20: mol_type = other RNA
ctgtggagttactctcgttt

SEQ ID NO: 3036 - RNA, 20 nt, synthetic construct
  misc_feature 1..20: note = HBV-targeting guide sequence portion
  source 1..20: mol_type = other RNA
ctgtgggtcaccatattctt

SEQ ID NO: 3037 - RNA, 20 nt, synthetic construct
  misc_feature 1..20: note = HBV-targeting guide sequence portion
  source 1..20: mol_type = other RNA
ctgtgtaaacaatacctgaa

SEQ ID NO: 3038 - RNA, 20 nt, synthetic construct
  misc_feature 1..20: note = HBV-targeting guide sequence portion
  source 1..20: mol_type = other RNA
ctgttaaccgggagttttct

SEQ ID NO: 3039 - RNA, 20 nt, synthetic construct
  misc_feature 1..20: note = HBV-targeting guide sequence portion
  source 1..20: mol_type = other RNA
ctgttaccaattttcttttg

SEQ ID NO: 3040 - RNA, 20 nt, synthetic construct
  misc_feature 1..20: note = HBV-targeting guide sequence portion
  source 1..20: mol_type = other RNA
ctgttcaagcctccaagctg

SEQ ID NO: 3041 - RNA, 20 nt, synthetic construct
  misc_feature 1..20: note = HBV-targeting guide sequence portion
  source 1..20: mol_type = other RNA
ctgttcacattttttgataa

SEQ ID NO: 3042 - RNA, 20 nt, synthetic construct
  misc_feature 1..20: note = HBV-targeting guide sequence portion
  source 1..20: mol_type = other RNA
ctgttccgactactgcctct

SEQ ID NO: 3043 - RNA, 20 nt, synthetic construct
  misc_feature 1..20: note = HBV-targeting guide sequence portion
  source 1..20: mol_type = other RNA
ctgttcctgaactggagcca

SEQ ID NO: 3044 - RNA, 20 nt, synthetic construct
  misc_feature 1..20: note = HBV-targeting guide sequence portion
  source 1..20: mol_type = other RNA
ctgttgctgtacaaaacctt

SEQ ID NO: 3045 - RNA, 20 nt, synthetic construct
  misc_feature 1..20: note = HBV-targeting guide sequence portion
  source 1..20: mol_type = other RNA
ctgttgtcctctcccgcaaa

SEQ ID NO: 3046 - RNA, 20 nt, synthetic construct
  misc_feature 1..20: note = HBV-targeting guide sequence portion
  source 1..20: mol_type = other RNA
ctgtttggctttcagttata

SEQ ID NO: 3047 - RNA, 20 nt, synthetic construct
  misc_feature 1..20: note = HBV-targeting guide sequence portion
  source 1..20: mol_type = other RNA
ctgtttgtttaaagactggg

SEQ ID NO: 3048 - RNA, 20 nt, synthetic construct
  misc_feature 1..20: note = HBV-targeting guide sequence portion
  source 1..20: mol_type = other RNA
cttaatttcatgggctatgt

SEQ ID NO: 3049 - RNA, 20 nt, synthetic construct
  misc_feature 1..20: note = HBV-targeting guide sequence portion
  source 1..20: mol_type = other RNA
cttacaaggcctttctgtgt

SEQ ID NO: 3050 - RNA, 20 nt, synthetic construct
  misc_feature 1..20: note = HBV-targeting guide sequence portion
  source 1..20: mol_type = other RNA
cttacagttaatgagaaaag

SEQ ID NO: 3051 - RNA, 20 nt, synthetic construct
  misc_feature 1..20: note = HBV-targeting guide sequence portion
  source 1..20: mol_type = other RNA
cttacataagaggactcttg

SEQ ID NO: 3052 - RNA, 20 nt, synthetic construct
  misc_feature 1..20: note = HBV-targeting guide sequence portion
  source 1..20: mol_type = other RNA
cttacttttggaagagaaac

SEQ ID NO: 3053 - RNA, 20 nt, synthetic construct
  misc_feature 1..20: note = HBV-targeting guide sequence portion
  source 1..20: mol_type = other RNA
cttagattgaatacatgcat

SEQ ID NO: 3054 - RNA, 20 nt, synthetic construct
  misc_feature 1..20: note = HBV-targeting guide sequence portion
  source 1..20: mol_type = other RNA
cttatagaccaccaaatgcc

SEQ ID NO: 3055 - RNA, 20 nt, synthetic construct
  misc_feature 1..20: note = HBV-targeting guide sequence portion
  source 1..20: mol_type = other RNA
cttatataaaacacccgcct

SEQ ID NO: 3056 - RNA, 20 nt, synthetic construct
  misc_feature 1..20: note = HBV-targeting guide sequence portion
  source 1..20: mol_type = other RNA
cttatccaagggcaagtatt

SEQ ID NO: 3057 - RNA, 20 nt, synthetic construct
  misc_feature 1..20: note = HBV-targeting guide sequence portion
  source 1..20: mol_type = other RNA
cttatgagtccaagggatac

SEQ ID NO: 3058 - RNA, 20 nt, synthetic construct
  misc_feature 1..20: note = HBV-targeting guide sequence portion
  source 1..20: mol_type = other RNA
cttatgtaagaccttgggca

SEQ ID NO: 3059 - RNA, 20 nt, synthetic construct
  misc_feature 1..20: note = HBV-targeting guide sequence portion
  source 1..20: mol_type = other RNA
cttattatccagaacatcta

SEQ ID NO: 3060 - RNA, 20 nt, synthetic construct
  misc_feature 1..20: note = HBV-targeting guide sequence portion
  source 1..20: mol_type = other RNA
cttcaaagactgtttgttta

SEQ ID NO: 3061 - RNA, 20 nt, synthetic construct
  misc_feature 1..20: note = HBV-targeting guide sequence portion
  source 1..20: mol_type = other RNA
cttcaatcccaacaaggatc

SEQ ID NO: 3062 - RNA, 20 nt, synthetic construct
  misc_feature 1..20: note = HBV-targeting guide sequence portion
  source 1..20: mol_type = other RNA
cttcacctctgcacgtcgca

SEQ ID NO: 3063 - RNA, 20 nt, synthetic construct
  misc_feature 1..20: note = HBV-targeting guide sequence portion
  source 1..20: mol_type = other RNA
cttcagagcaaactccaaca

SEQ ID NO: 3064 - RNA, 20 nt, synthetic construct
  misc_feature 1..20: note = HBV-targeting guide sequence portion
  source 1..20: mol_type = other RNA
cttcatcctgctgctatgcc

SEQ ID NO: 3065 - RNA, 20 nt, synthetic construct
  misc_feature 1..20: note = HBV-targeting guide sequence portion
  source 1..20: mol_type = other RNA
cttccaaaagtaagacaaga

SEQ ID NO: 3066 - RNA, 20 nt, synthetic construct
  misc_feature 1..20: note = HBV-targeting guide sequence portion
  source 1..20: mol_type = other RNA
cttccaaactagacactatt

SEQ ID NO: 3067 - RNA, 20 nt, synthetic construct
  misc_feature 1..20: note = HBV-targeting guide sequence portion
  source 1..20: mol_type = other RNA
cttccaccaaactctgcaag

SEQ ID NO: 3068 - RNA, 20 nt, synthetic construct
  misc_feature 1..20: note = HBV-targeting guide sequence portion
  source 1..20: mol_type = other RNA
cttccatagagtgtgtaaat

SEQ ID NO: 3069 - RNA, 20 nt, synthetic construct
  misc_feature 1..20: note = HBV-targeting guide sequence portion
  source 1..20: mol_type = other RNA
cttccggagacttgtgttgt

SEQ ID NO: 3070 - RNA, 20 nt, synthetic construct
  misc_feature 1..20: note = HBV-targeting guide sequence portion
  source 1..20: mol_type = other RNA
cttccgtacgagatcttcta

SEQ ID NO: 3071 - RNA, 20 nt, synthetic construct
  misc_feature 1..20: note = HBV-targeting guide sequence portion
  source 1..20: mol_type = other RNA
cttcctcttcatcctgctgc

SEQ ID NO: 3072 - RNA, 20 nt, synthetic construct
  misc_feature 1..20: note = HBV-targeting guide sequence portion
  source 1..20: mol_type = other RNA
cttcgcttcacctctgcacg

SEQ ID NO: 3073 - RNA, 20 nt, synthetic construct
  misc_feature 1..20: note = HBV-targeting guide sequence portion
  source 1..20: mol_type = other RNA
cttcggatggaaactgcacc

SEQ ID NO: 3074 - RNA, 20 nt, synthetic construct
  misc_feature 1..20: note = HBV-targeting guide sequence portion
  source 1..20: mol_type = other RNA
cttcgtctgcgaggcgaggg

SEQ ID NO: 3075 - RNA, 20 nt, synthetic construct
  misc_feature 1..20: note = HBV-targeting guide sequence portion
  source 1..20: mol_type = other RNA
cttctaaattagtacccacc

SEQ ID NO: 3076 - RNA, 20 nt, synthetic construct
  misc_feature 1..20: note = HBV-targeting guide sequence portion
  source 1..20: mol_type = other RNA
cttctactgtacctgtcttt

SEQ ID NO: 3077 - RNA, 20 nt, synthetic construct
  misc_feature 1..20: note = HBV-targeting guide sequence portion
  source 1..20: mol_type = other RNA
cttctagataccgccgcagc

SEQ ID NO: 3078 - RNA, 20 nt, synthetic construct
  misc_feature 1..20: note = HBV-targeting guide sequence portion
  source 1..20: mol_type = other RNA
cttctaggggacctgcctcg

SEQ ID NO: 3079 - RNA, 20 nt, synthetic construct
  misc_feature 1..20: note = HBV-targeting guide sequence portion
  source 1..20: mol_type = other RNA
cttctcatctgccggaccgt

SEQ ID NO: 3080 - RNA, 20 nt, synthetic construct
  misc_feature 1..20: note = HBV-targeting guide sequence portion
  source 1..20: mol_type = other RNA
cttctcgaggattggggacc

SEQ ID NO: 3081 - RNA, 20 nt, synthetic construct
  misc_feature 1..20: note = HBV-targeting guide sequence portion
  source 1..20: mol_type = other RNA
cttctctcaattttctaggg

SEQ ID NO: 3082 - RNA, 20 nt, synthetic construct
  misc_feature 1..20: note = HBV-targeting guide sequence portion
  source 1..20: mol_type = other RNA
cttctctgcctgccgttccg

SEQ ID NO: 3083 - RNA, 20 nt, synthetic construct
  misc_feature 1..20: note = HBV-targeting guide sequence portion
  source 1..20: mol_type = other RNA
cttctgacttctttccttcc

SEQ ID NO: 3084 - RNA, 20 nt, synthetic construct
  misc_feature 1..20: note = HBV-targeting guide sequence portion
  source 1..20: mol_type = other RNA
cttctgcgacgcggcgattg

SEQ ID NO: 3085 - RNA, 20 nt, synthetic construct
  misc_feature 1..20: note = HBV-targeting guide sequence portion
  source 1..20: mol_type = other RNA
cttctggactatcaaggtat

SEQ ID NO: 3086 - RNA, 20 nt, synthetic construct
  misc_feature 1..20: note = HBV-targeting guide sequence portion
  source 1..20: mol_type = other RNA
cttctgggttttgctgcccc

SEQ ID NO: 3087 - RNA, 20 nt, synthetic construct
  misc_feature 1..20: note = HBV-targeting guide sequence portion
  source 1..20: mol_type = other RNA
cttcttctaggggacctgcc

SEQ ID NO: 3088 - RNA, 20 nt, synthetic construct
  misc_feature 1..20: note = HBV-targeting guide sequence portion
  source 1..20: mol_type = other RNA
cttcttgttggttcttctgg

SEQ ID NO: 3089 - RNA, 20 nt, synthetic construct
  misc_feature 1..20: note = HBV-targeting guide sequence portion
  source 1..20: mol_type = other RNA
cttctttccttccgtacgag

SEQ ID NO: 3090 - RNA, 20 nt, synthetic construct
  misc_feature 1..20: note = HBV-targeting guide sequence portion
  source 1..20: mol_type = other RNA
cttgaacagtaggacatgaa

SEQ ID NO: 3091 - RNA, 20 nt, synthetic construct
  misc_feature 1..20: note = HBV-targeting guide sequence portion
  source 1..20: mol_type = other RNA
cttgagcaggagtcgtgcag

SEQ ID NO: 3092 - RNA, 20 nt, synthetic construct
  misc_feature 1..20: note = HBV-targeting guide sequence portion
  source 1..20: mol_type = other RNA
cttgaggcatacttcaaaga

SEQ ID NO: 3093 - RNA, 20 nt, synthetic construct
  misc_feature 1..20: note = HBV-targeting guide sequence portion
  source 1..20: mol_type = other RNA
cttgagtccctttataccgc

SEQ ID NO: 3094 - RNA, 20 nt, synthetic construct
  misc_feature 1..20: note = HBV-targeting guide sequence portion
  source 1..20: mol_type = other RNA
cttgatagtccagaagaacc

SEQ ID NO: 3095 - RNA, 20 nt, synthetic construct
  misc_feature 1..20: note = HBV-targeting guide sequence portion
  source 1..20: mol_type = other RNA
cttgatcttctaaattagta

SEQ ID NO: 3096 - RNA, 20 nt, synthetic construct
  misc_feature 1..20: note = HBV-targeting guide sequence portion
  source 1..20: mol_type = other RNA
cttgcagagtttggtggaag

SEQ ID NO: 3097 - RNA, 20 nt, synthetic construct
  misc_feature 1..20: note = HBV-targeting guide sequence portion
  source 1..20: mol_type = other RNA
cttgccagcaaatccgcctc

SEQ ID NO: 3098 - RNA, 20 nt, synthetic construct
  misc_feature 1..20: note = HBV-targeting guide sequence portion
  source 1..20: mol_type = other RNA
cttgcccaaggtcttacata

SEQ ID NO: 3099 - RNA, 20 nt, synthetic construct
  misc_feature 1..20: note = HBV-targeting guide sequence portion
  source 1..20: mol_type = other RNA
cttgcccttggataagggta

SEQ ID NO: 3100 - RNA, 20 nt, synthetic construct
  misc_feature 1..20: note = HBV-targeting guide sequence portion
  source 1..20: mol_type = other RNA
cttgcctgagtgcagtatgg

SEQ ID NO: 3101 - RNA, 20 nt, synthetic construct
  misc_feature 1..20: note = HBV-targeting guide sequence portion
  source 1..20: mol_type = other RNA
cttggactcataaggtggga

SEQ ID NO: 3102 - RNA, 20 nt, synthetic construct
  misc_feature 1..20: note = HBV-targeting guide sequence portion
  source 1..20: mol_type = other RNA
cttggactctctgcaatgtc

SEQ ID NO: 3103 - RNA, 20 nt, synthetic construct
  misc_feature 1..20: note = HBV-targeting guide sequence portion
  source 1..20: mol_type = other RNA
cttggaggcttgaacagtag

SEQ ID NO: 3104 - RNA, 20 nt, synthetic construct
  misc_feature 1..20: note = HBV-targeting guide sequence portion
  source 1..20: mol_type = other RNA
cttggagtctcctgagcatt

SEQ ID NO: 3105 - RNA, 20 nt, synthetic construct
  misc_feature 1..20: note = HBV-targeting guide sequence portion
  source 1..20: mol_type = other RNA
cttggataagggtattaaac

SEQ ID NO: 3106 - RNA, 20 nt, synthetic construct
  misc_feature 1..20: note = HBV-targeting guide sequence portion
  source 1..20: mol_type = other RNA
cttggcacagacctggccgt

SEQ ID NO: 3107 - RNA, 20 nt, synthetic construct
  misc_feature 1..20: note = HBV-targeting guide sequence portion
  source 1..20: mol_type = other RNA
cttggccaaaattcgcagtc

SEQ ID NO: 3108 - RNA, 20 nt, synthetic construct
  misc_feature 1..20: note = HBV-targeting guide sequence portion
  source 1..20: mol_type = other RNA
cttggcccccaataccacat

SEQ ID NO: 3109 - RNA, 20 nt, synthetic construct
  misc_feature 1..20: note = HBV-targeting guide sequence portion
  source 1..20: mol_type = other RNA
cttggctcagtttactagtg

SEQ ID NO: 3110 - RNA, 20 nt, synthetic construct
  misc_feature 1..20: note = HBV-targeting guide sequence portion
  source 1..20: mol_type = other RNA
cttgggaacaagagctacag

SEQ ID NO: 3111 - RNA, 20 nt, synthetic construct
  misc_feature 1..20: note = HBV-targeting guide sequence portion
  source 1..20: mol_type = other RNA
cttgggcaagaattggtggg

SEQ ID NO: 3112 - RNA, 20 nt, synthetic construct
  misc_feature 1..20: note = HBV-targeting guide sequence portion
  source 1..20: mol_type = other RNA
cttggggccctgtcgtcctc

SEQ ID NO: 3113 - RNA, 20 nt, synthetic construct
  misc_feature 1..20: note = HBV-targeting guide sequence portion
  source 1..20: mol_type = other RNA
cttgggtggctttagggcat

SEQ ID NO: 3114 - RNA, 20 nt, synthetic construct
  misc_feature 1..20: note = HBV-targeting guide sequence portion
  source 1..20: mol_type = other RNA
cttggtcataggccatcagc

SEQ ID NO: 3115 - RNA, 20 nt, synthetic construct
  misc_feature 1..20: note = HBV-targeting guide sequence portion
  source 1..20: mol_type = other RNA
cttggtgtagatgtatatta

SEQ ID NO: 3116 - RNA, 20 nt, synthetic construct
  misc_feature 1..20: note = HBV-targeting guide sequence portion
  source 1..20: mol_type = other RNA
cttgtaagttggcgaaaaag

SEQ ID NO: 3117 - RNA, 20 nt, synthetic construct
  misc_feature 1..20: note = HBV-targeting guide sequence portion
  source 1..20: mol_type = other RNA
cttgtatgcatgtattcaat

SEQ ID NO: 3118 - RNA, 20 nt, synthetic construct
  misc_feature 1..20: note = HBV-targeting guide sequence portion
  source 1..20: mol_type = other RNA
cttgtcaacaaggaaaaccc

SEQ ID NO: 3119 - RNA, 20 nt, synthetic construct
  misc_feature 1..20: note = HBV-targeting guide sequence portion
  source 1..20: mol_type = other RNA
cttgtcctggttatcgctgg

SEQ ID NO: 3120 - RNA, 20 nt, synthetic construct
  misc_feature 1..20: note = HBV-targeting guide sequence portion
  source 1..20: mol_type = other RNA
cttgtcttacttttggaaga

SEQ ID NO: 3121 - RNA, 20 nt, synthetic construct
  misc_feature 1..20: note = HBV-targeting guide sequence portion
  source 1..20: mol_type = other RNA
cttgtgttgttagacgacga

SEQ ID NO: 3122 - RNA, 20 nt, synthetic construct
  misc_feature 1..20: note = HBV-targeting guide sequence portion
  source 1..20: mol_type = other RNA
cttgttcatgtcctactgtt

SEQ ID NO: 3123 - RNA, 20 nt, synthetic construct
  misc_feature 1..20: note = HBV-targeting guide sequence portion
  source 1..20: mol_type = other RNA
cttgttcccaagaatatggt

SEQ ID NO: 3124 - RNA, 20 nt, synthetic construct
  misc_feature 1..20: note = HBV-targeting guide sequence portion
  source 1..20: mol_type = other RNA
cttgttgacaagaatcctca

SEQ ID NO: 3125 - RNA, 20 nt, synthetic construct
  misc_feature 1..20: note = HBV-targeting guide sequence portion
  source 1..20: mol_type = other RNA
cttgttggcgtctggccagg

SEQ ID NO: 3126 - RNA, 20 nt, synthetic construct
  misc_feature 1..20: note = HBV-targeting guide sequence portion
  source 1..20: mol_type = other RNA
cttgttgggattgaagtccc

SEQ ID NO: 3127 - RNA, 20 nt, synthetic construct
  misc_feature 1..20: note = HBV-targeting guide sequence portion
  source 1..20: mol_type = other RNA
cttgttggttcttctggact

SEQ ID NO: 3128 - RNA, 20 nt, synthetic construct
  misc_feature 1..20: note = HBV-targeting guide sequence portion
  source 1..20: mol_type = other RNA
cttgttttgctcgcagccgg

SEQ ID NO: 3129 - RNA, 20 nt, synthetic construct
  misc_feature 1..20: note = HBV-targeting guide sequence portion
  source 1..20: mol_type = other RNA
ctttaaacaaacagtctttg

SEQ ID NO: 3130 - RNA, 20 nt, synthetic construct
  misc_feature 1..20: note = HBV-targeting guide sequence portion
  source 1..20: mol_type = other RNA
ctttaaccctcattggaaaa

SEQ ID NO: 3131 - RNA, 20 nt, synthetic construct
  misc_feature 1..20: note = HBV-targeting guide sequence portion
  source 1..20: mol_type = other RNA
ctttaatgcccttgtatgca

SEQ ID NO: 3132 - RNA, 20 nt, synthetic construct
  misc_feature 1..20: note = HBV-targeting guide sequence portion
  source 1..20: mol_type = other RNA
ctttaccccgttgccaggca

SEQ ID NO: 3133 - RNA, 20 nt, synthetic construct
  misc_feature 1..20: note = HBV-targeting guide sequence portion
  source 1..20: mol_type = other RNA
ctttacgcggactccccgtc

SEQ ID NO: 3134 - RNA, 20 nt, synthetic construct
  misc_feature 1..20: note = HBV-targeting guide sequence portion
  source 1..20: mol_type = other RNA
ctttaggcccatatgagtgt

SEQ ID NO: 3135 - RNA, 20 nt, synthetic construct
  misc_feature 1..20: note = HBV-targeting guide sequence portion
  source 1..20: mol_type = other RNA
ctttagggcatggacattga

SEQ ID NO: 3136 - RNA, 20 nt, synthetic construct
  misc_feature 1..20: note = HBV-targeting guide sequence portion
  source 1..20: mol_type = other RNA
ctttataccgctgttaccaa

SEQ ID NO: 3137 - RNA, 20 nt, synthetic construct
  misc_feature 1..20: note = HBV-targeting guide sequence portion
  source 1..20: mol_type = other RNA
ctttatatgggtcaatgtcc

SEQ ID NO: 3138 - RNA, 20 nt, synthetic construct
  misc_feature 1..20: note = HBV-targeting guide sequence portion
  source 1..20: mol_type = other RNA
ctttattcttctactgtacc

SEQ ID NO: 3139 - RNA, 20 nt, synthetic construct
  misc_feature 1..20: note = HBV-targeting guide sequence portion
  source 1..20: mol_type = other RNA
ctttcactttttcgccaact

SEQ ID NO: 3140 - RNA, 20 nt, synthetic construct
  misc_feature 1..20: note = HBV-targeting guide sequence portion
  source 1..20: mol_type = other RNA
ctttcagttatatggatgat

SEQ ID NO: 3141 - RNA, 20 nt, synthetic construct
  misc_feature 1..20: note = HBV-targeting guide sequence portion
  source 1..20: mol_type = other RNA
ctttccaatcaataggcctg

SEQ ID NO: 3142 - RNA, 20 nt, synthetic construct
  misc_feature 1..20: note = HBV-targeting guide sequence portion
  source 1..20: mol_type = other RNA
ctttccaccagcaatcctct

SEQ ID NO: 3143 - RNA, 20 nt, synthetic construct
  misc_feature 1..20: note = HBV-targeting guide sequence portion
  source 1..20: mol_type = other RNA
ctttcccccactgtttggct

SEQ ID NO: 3144 - RNA, 20 nt, synthetic construct
  misc_feature 1..20: note = HBV-targeting guide sequence portion
  source 1..20: mol_type = other RNA
ctttcccgaccaccagttgg

SEQ ID NO: 3145 - RNA, 20 nt, synthetic construct
  misc_feature 1..20: note = HBV-targeting guide sequence portion
  source 1..20: mol_type = other RNA
ctttccggctcctctgccga

SEQ ID NO: 3146 - RNA, 20 nt, synthetic construct
  misc_feature 1..20: note = HBV-targeting guide sequence portion
  source 1..20: mol_type = other RNA
ctttccttccgtacgagatc

SEQ ID NO: 3147 - RNA, 20 nt, synthetic construct
  misc_feature 1..20: note = HBV-targeting guide sequence portion
  source 1..20: mol_type = other RNA
ctttcggaaaattcctatgg

SEQ ID NO: 3148 - RNA, 20 nt, synthetic construct
  misc_feature 1..20: note = HBV-targeting guide sequence portion
  source 1..20: mol_type = other RNA
ctttctgtgtaaacaatacc

SEQ ID NO: 3149 - RNA, 20 nt, synthetic construct
  misc_feature 1..20: note = HBV-targeting guide sequence portion
  source 1..20: mol_type = other RNA
ctttgaagtatgcctcaagg

SEQ ID NO: 3150 - RNA, 20 nt, synthetic construct
  misc_feature 1..20: note = HBV-targeting guide sequence portion
  source 1..20: mol_type = other RNA
ctttgattttgtgtatgatg

SEQ ID NO: 3151 - RNA, 20 nt, synthetic construct
  misc_feature 1..20: note = HBV-targeting guide sequence portion
  source 1..20: mol_type = other RNA
ctttgctggggagaactaat

SEQ ID NO: 3152 - RNA, 20 nt, synthetic construct
  misc_feature 1..20: note = HBV-targeting guide sequence portion
  source 1..20: mol_type = other RNA
ctttgggtgtacatttaaac

SEQ ID NO: 3153 - RNA, 20 nt, synthetic construct
  misc_feature 1..20: note = HBV-targeting guide sequence portion
  source 1..20: mol_type = other RNA
ctttgtactaggaggctgta

SEQ ID NO: 3154 - RNA, 20 nt, synthetic construct
  misc_feature 1..20: note = HBV-targeting guide sequence portion
  source 1..20: mol_type = other RNA
ctttgtttacgtcccgtcgg

SEQ ID NO: 3155 - RNA, 20 nt, synthetic construct
  misc_feature 1..20: note = HBV-targeting guide sequence portion
  source 1..20: mol_type = other RNA
ctttgttttgttagggttta

SEQ ID NO: 3156 - RNA, 20 nt, synthetic construct
  misc_feature 1..20: note = HBV-targeting guide sequence portion
  source 1..20: mol_type = other RNA
cttttacacaatgtggttat

SEQ ID NO: 3157 - RNA, 20 nt, synthetic construct
  misc_feature 1..20: note = HBV-targeting guide sequence portion
  source 1..20: mol_type = other RNA
cttttcctaatatacatcta

SEQ ID NO: 3158 - RNA, 20 nt, synthetic construct
  misc_feature 1..20: note = HBV-targeting guide sequence portion
  source 1..20: mol_type = other RNA
cttttctcattaactgtaag

SEQ ID NO: 3159 - RNA, 20 nt, synthetic construct
  misc_feature 1..20: note = HBV-targeting guide sequence portion
  source 1..20: mol_type = other RNA
cttttggaagagaaacggtc

SEQ ID NO: 3160 - RNA, 20 nt, synthetic construct
  misc_feature 1..20: note = HBV-targeting guide sequence portion
  source 1..20: mol_type = other RNA
cttttggagtgtggattcgc

SEQ ID NO: 3161 - RNA, 20 nt, synthetic construct
  misc_feature 1..20: note = HBV-targeting guide sequence portion
  source 1..20: mol_type = other RNA
cttttggggtggagccctca

SEQ ID NO: 3162 - RNA, 20 nt, synthetic construct
  misc_feature 1..20: note = HBV-targeting guide sequence portion
  source 1..20: mol_type = other RNA
cttttgtctttgggtgtaca

SEQ ID NO: 3163 - RNA, 20 nt, synthetic construct
  misc_feature 1..20: note = HBV-targeting guide sequence portion
  source 1..20: mol_type = other RNA
ctttttcacctctgcctaat

SEQ ID NO: 3164 - RNA, 20 nt, synthetic construct
  misc_feature 1..20: note = HBV-targeting guide sequence portion
  source 1..20: mol_type = other RNA
ctttttcgccaacttacaag

SEQ ID NO: 3165 - RNA, 20 nt, synthetic construct
  misc_feature 1..20: note = HBV-targeting guide sequence portion
  source 1..20: mol_type = other RNA
gaaaaagtgaaagcctgctt

SEQ ID NO: 3166 - RNA, 20 nt, synthetic construct
  misc_feature 1..20: note = HBV-targeting guide sequence portion
  source 1..20: mol_type = other RNA
gaaaaagttgcatggtgctg

SEQ ID NO: 3167 - RNA, 20 nt, synthetic construct
  misc_feature 1..20: note = HBV-targeting guide sequence portion
  source 1..20: mol_type = other RNA
gaaaacaccctcttttccta

SEQ ID NO: 3168 - RNA, 20 nt, synthetic construct
  misc_feature 1..20: note = HBV-targeting guide sequence portion
  source 1..20: mol_type = other RNA
gaaaaccccgcctgtaacac

SEQ ID NO: 3169 - RNA, 20 nt, synthetic construct
  misc_feature 1..20: note = HBV-targeting guide sequence portion
  source 1..20: mol_type = other RNA
gaaaactcccggttaacagg

SEQ ID NO: 3170 - RNA, 20 nt, synthetic construct
  misc_feature 1..20: note = HBV-targeting guide sequence portion
  source 1..20: mol_type = other RNA
gaaaagacggttgaaattga

SEQ ID NO: 3171 - RNA, 20 nt, synthetic construct
  misc_feature 1..20: note = HBV-targeting guide sequence portion
  source 1..20: mol_type = other RNA
gaaaagagggtgttttccaa

SEQ ID NO: 3172 - RNA, 20 nt, synthetic construct
  misc_feature 1..20: note = HBV-targeting guide sequence portion
  source 1..20: mol_type = other RNA
gaaaattcctatgggagtgg

SEQ ID NO: 3173 - RNA, 20 nt, synthetic construct
  misc_feature 1..20: note = HBV-targeting guide sequence portion
  source 1..20: mol_type = other RNA
gaaaattgagagaagtccac

SEQ ID NO: 3174 - RNA, 20 nt, synthetic construct
  misc_feature 1..20: note = HBV-targeting guide sequence portion
  source 1..20: mol_type = other RNA
gaaaattggtaacagcggta

SEQ ID NO: 3175 - RNA, 20 nt, synthetic construct
  misc_feature 1..20: note = HBV-targeting guide sequence portion
  source 1..20: mol_type = other RNA
gaaacactcatcctcaggcc

SEQ ID NO: 3176 - RNA, 20 nt, synthetic construct
  misc_feature 1..20: note = HBV-targeting guide sequence portion
  source 1..20: mol_type = other RNA
gaaacataccttgatagtcc

SEQ ID NO: 3177 - RNA, 20 nt, synthetic construct
  misc_feature 1..20: note = HBV-targeting guide sequence portion
  source 1..20: mol_type = other RNA
gaaacattctttgattttgt

SEQ ID NO: 3178 - RNA, 20 nt, synthetic construct
  misc_feature 1..20: note = HBV-targeting guide sequence portion
  source 1..20: mol_type = other RNA
gaaaccacaatagttgtctg

SEQ ID NO: 3179 - RNA, 20 nt, synthetic construct
  misc_feature 1..20: note = HBV-targeting guide sequence portion
  source 1..20: mol_type = other RNA
gaaacgggctgaggcccact

SEQ ID NO: 3180 - RNA, 20 nt, synthetic construct
  misc_feature 1..20: note = HBV-targeting guide sequence portion
  source 1..20: mol_type = other RNA
gaaacggtcctagagtattt

SEQ ID NO: 3181 - RNA, 20 nt, synthetic construct
  misc_feature 1..20: note = HBV-targeting guide sequence portion
  source 1..20: mol_type = other RNA
gaaactgcacctgtattccc

SEQ ID NO: 3182 - RNA, 20 nt, synthetic construct
  misc_feature 1..20: note = HBV-targeting guide sequence portion
  source 1..20: mol_type = other RNA
gaaagaagtcagaaggcaaa

SEQ ID NO: 3183 - RNA, 20 nt, synthetic construct
  misc_feature 1..20: note = HBV-targeting guide sequence portion
  source 1..20: mol_type = other RNA
gaaagaatcccagaggattg

SEQ ID NO: 3184 - RNA, 20 nt, synthetic construct
  misc_feature 1..20: note = HBV-targeting guide sequence portion
  source 1..20: mol_type = other RNA
gaaagattctgccccatgct

SEQ ID NO: 3185 - RNA, 20 nt, synthetic construct
  misc_feature 1..20: note = HBV-targeting guide sequence portion
  source 1..20: mol_type = other RNA
gaaagccaaacagtggggga

SEQ ID NO: 3186 - RNA, 20 nt, synthetic construct
  misc_feature 1..20: note = HBV-targeting guide sequence portion
  source 1..20: mol_type = other RNA
gaaagcccaggatgatggga

SEQ ID NO: 3187 - RNA, 20 nt, synthetic construct
  misc_feature 1..20: note = HBV-targeting guide sequence portion
  source 1..20: mol_type = other RNA
gaaagccctacgaaccactg

SEQ ID NO: 3188 - RNA, 20 nt, synthetic construct
  misc_feature 1..20: note = HBV-targeting guide sequence portion
  source 1..20: mol_type = other RNA
gaaagcctgcttagattgaa

SEQ ID NO: 3189 - RNA, 20 nt, synthetic construct
  misc_feature 1..20: note = HBV-targeting guide sequence portion
  source 1..20: mol_type = other RNA
gaaaggccttgtaagttggc

SEQ ID NO: 3190 - RNA, 20 nt, synthetic construct
  misc_feature 1..20: note = HBV-targeting guide sequence portion
  source 1..20: mol_type = other RNA
gaaaggttccacgcatgcgc

SEQ ID NO: 3191 - RNA, 20 nt, synthetic construct
  misc_feature 1..20: note = HBV-targeting guide sequence portion
  source 1..20: mol_type = other RNA
gaaagtgtgtcaacgaattg

SEQ ID NO: 3192 - RNA, 20 nt, synthetic construct
  misc_feature 1..20: note = HBV-targeting guide sequence portion
  source 1..20: mol_type = other RNA
gaaatgtgaaaccacaatag

SEQ ID NO: 3193 - RNA, 20 nt, synthetic construct
  misc_feature 1..20: note = HBV-targeting guide sequence portion
  source 1..20: mol_type = other RNA
gaaattaagagaataacccc

SEQ ID NO: 3194 - RNA, 20 nt, synthetic construct
  misc_feature 1..20: note = HBV-targeting guide sequence portion
  source 1..20: mol_type = other RNA
gaaattgattatgcctgcta

SEQ ID NO: 3195 - RNA, 20 nt, synthetic construct
  misc_feature 1..20: note = HBV-targeting guide sequence portion
  source 1..20: mol_type = other RNA
gaaattttacggggctttat

SEQ ID NO: 3196 - RNA, 20 nt, synthetic construct
  misc_feature 1..20: note = HBV-targeting guide sequence portion
  source 1..20: mol_type = other RNA
gaacaaatggcactagtaaa

SEQ ID NO: 3197 - RNA, 20 nt, synthetic construct
  misc_feature 1..20: note = HBV-targeting guide sequence portion
  source 1..20: mol_type = other RNA
gaacaagagatgattaggca

SEQ ID NO: 3198 - RNA, 20 nt, synthetic construct
  misc_feature 1..20: note = HBV-targeting guide sequence portion
  source 1..20: mol_type = other RNA
gaacaagagctacagcatgg

SEQ ID NO: 3199 - RNA, 20 nt, synthetic construct
  misc_feature 1..20: note = HBV-targeting guide sequence portion
  source 1..20: mol_type = other RNA
gaacaatgctcaggagactc

SEQ ID NO: 3200 - RNA, 20 nt, synthetic construct
  misc_feature 1..20: note = HBV-targeting guide sequence portion
  source 1..20: mol_type = other RNA
gaacagggtttactgttcct

SEQ ID NO: 3201 - RNA, 20 nt, synthetic construct
  misc_feature 1..20: note = HBV-targeting guide sequence portion
  source 1..20: mol_type = other RNA
gaacagtaaaccctgttccg

SEQ ID NO: 3202 - RNA, 20 nt, synthetic construct
  misc_feature 1..20: note = HBV-targeting guide sequence portion
  source 1..20: mol_type = other RNA
gaacagtaggacatgaacaa

SEQ ID NO: 3203 - RNA, 20 nt, synthetic construct
  misc_feature 1..20: note = HBV-targeting guide sequence portion
  source 1..20: mol_type = other RNA
gaacagtttgtaggcccgct

SEQ ID NO: 3204 - RNA, 20 nt, synthetic construct
  misc_feature 1..20: note = HBV-targeting guide sequence portion
  source 1..20: mol_type = other RNA
gaacatcacatcaggattcc

SEQ ID NO: 3205 - RNA, 20 nt, synthetic construct
  misc_feature 1..20: note = HBV-targeting guide sequence portion
  source 1..20: mol_type = other RNA
gaacatctagttaatcatta

SEQ ID NO: 3206 - RNA, 20 nt, synthetic construct
  misc_feature 1..20: note = HBV-targeting guide sequence portion
  source 1..20: mol_type = other RNA
gaacatggagaacatcacat

SEQ ID NO: 3207 - RNA, 20 nt, synthetic construct
  misc_feature 1..20: note = HBV-targeting guide sequence portion
  source 1..20: mol_type = other RNA
gaaccaacaagaagatgagg

SEQ ID NO: 3208 - RNA, 20 nt, synthetic construct
  misc_feature 1..20: note = HBV-targeting guide sequence portion
  source 1..20: mol_type = other RNA
gaaccactgaacaaatggca

SEQ ID NO: 3209 - RNA, 20 nt, synthetic construct
  misc_feature 1..20: note = HBV-targeting guide sequence portion
  source 1..20: mol_type = other RNA
gaaccctagcccgaatgctc

SEQ ID NO: 3210 - RNA, 20 nt, synthetic construct
  misc_feature 1..20: note = HBV-targeting guide sequence portion
  source 1..20: mol_type = other RNA
gaacctctatgtatccctcc

SEQ ID NO: 3211 - RNA, 20 nt, synthetic construct
  misc_feature 1..20: note = HBV-targeting guide sequence portion
  source 1..20: mol_type = other RNA
gaacctgcacgactcctgct

SEQ ID NO: 3212 - RNA, 20 nt, synthetic construct
  misc_feature 1..20: note = HBV-targeting guide sequence portion
  source 1..20: mol_type = other RNA
gaacctttaccccgttgcca

SEQ ID NO: 3213 - RNA, 20 nt, synthetic construct
  misc_feature 1..20: note = HBV-targeting guide sequence portion
  source 1..20: mol_type = other RNA
gaacctttccggctcctctg

SEQ ID NO: 3214 - RNA, 20 nt, synthetic construct
  misc_feature 1..20: note = HBV-targeting guide sequence portion
  source 1..20: mol_type = other RNA
gaacgatgtatatttgcggg

SEQ ID NO: 3215 - RNA, 20 nt, synthetic construct
  misc_feature 1..20: note = HBV-targeting guide sequence portion
  source 1..20: mol_type = other RNA
gaacgcccaccaattcttgc

SEQ ID NO: 3216 - RNA, 20 nt, synthetic construct
  misc_feature 1..20: note = HBV-targeting guide sequence portion
  source 1..20: mol_type = other RNA
gaacggcaggcagagaagag

SEQ ID NO: 3217 - RNA, 20 nt, synthetic construct
  misc_feature 1..20: note = HBV-targeting guide sequence portion
  source 1..20: mol_type = other RNA
gaactaatgactctagctac

SEQ ID NO: 3218 - RNA, 20 nt, synthetic construct
  misc_feature 1..20: note = HBV-targeting guide sequence portion
  source 1..20: mol_type = other RNA
gaactaccgtgtgtcttggc

SEQ ID NO: 3219 - RNA, 20 nt, synthetic construct
  misc_feature 1..20: note = HBV-targeting guide sequence portion
  source 1..20: mol_type = other RNA
gaactccctcgcctcgcaga

SEQ ID NO: 3220 - RNA, 20 nt, synthetic construct
  misc_feature 1..20: note = HBV-targeting guide sequence portion
  source 1..20: mol_type = other RNA
gaactcctagccgcttgttt

SEQ ID NO: 3221 - RNA, 20 nt, synthetic construct
  misc_feature 1..20: note = HBV-targeting guide sequence portion
  source 1..20: mol_type = other RNA
gaactggagccaccagcagg

SEQ ID NO: 3222 - RNA, 20 nt, synthetic construct
  misc_feature 1..20: note = HBV-targeting guide sequence portion
  source 1..20: mol_type = other RNA
gaactttaggcccatatgag

SEQ ID NO: 3223 - RNA, 20 nt, synthetic construct
  misc_feature 1..20: note = HBV-targeting guide sequence portion
  source 1..20: mol_type = other RNA
gaagaaccaacaagaagatg

SEQ ID NO: 3224 - RNA, 20 nt, synthetic construct
  misc_feature 1..20: note = HBV-targeting guide sequence portion
  source 1..20: mol_type = other RNA
gaagaactccctcgcctcgc

SEQ ID NO: 3225 - RNA, 20 nt, synthetic construct
  misc_feature 1..20: note = HBV-targeting guide sequence portion
  source 1..20: mol_type = other RNA
gaagaagaactccctcgcct

SEQ ID NO: 3226 - RNA, 20 nt, synthetic construct
  misc_feature 1..20: note = HBV-targeting guide sequence portion
  source 1..20: mol_type = other RNA
gaagaataaagccccgtaaa

SEQ ID NO: 3227 - RNA, 20 nt, synthetic construct
  misc_feature 1..20: note = HBV-targeting guide sequence portion
  source 1..20: mol_type = other RNA
gaagacccacaattcgttga

SEQ ID NO: 3228 - RNA, 20 nt, synthetic construct
  misc_feature 1..20: note = HBV-targeting guide sequence portion
  source 1..20: mol_type = other RNA
gaagagaaacggtcctagag

SEQ ID NO: 3229 - RNA, 20 nt, synthetic construct
  misc_feature 1..20: note = HBV-targeting guide sequence portion
  source 1..20: mol_type = other RNA
gaagaggaagatgataaaac

SEQ ID NO: 3230 - RNA, 20 nt, synthetic construct
  misc_feature 1..20: note = HBV-targeting guide sequence portion
  source 1..20: mol_type = other RNA
gaagaggacgacagggcccc

SEQ ID NO: 3231 - RNA, 20 nt, synthetic construct
  misc_feature 1..20: note = HBV-targeting guide sequence portion
  source 1..20: mol_type = other RNA
gaagatcaagcatctaggga

SEQ ID NO: 3232 - RNA, 20 nt, synthetic construct
  misc_feature 1..20: note = HBV-targeting guide sequence portion
  source 1..20: mol_type = other RNA
gaagatctcaatcgccgcgt

SEQ ID NO: 3233 - RNA, 20 nt, synthetic construct
  misc_feature 1..20: note = HBV-targeting guide sequence portion
  source 1..20: mol_type = other RNA
gaagatctcaatctcgggga

SEQ ID NO: 3234 - RNA, 20 nt, synthetic construct
  misc_feature 1..20: note = HBV-targeting guide sequence portion
  source 1..20: mol_type = other RNA
gaagatctcgtacggaagga

SEQ ID NO: 3235 - RNA, 20 nt, synthetic construct
  misc_feature 1..20: note = HBV-targeting guide sequence portion
  source 1..20: mol_type = other RNA
gaagatgaggcatagcagca

SEQ ID NO: 3236 - RNA, 20 nt, synthetic construct
  misc_feature 1..20: note = HBV-targeting guide sequence portion
  source 1..20: mol_type = other RNA
gaagatgataaaacgccgca

SEQ ID NO: 3237 - RNA, 20 nt, synthetic construct
  misc_feature 1..20: note = HBV-targeting guide sequence portion
  source 1..20: mol_type = other RNA
gaagattgacgatatgtgag

SEQ ID NO: 3238 - RNA, 20 nt, synthetic construct
  misc_feature 1..20: note = HBV-targeting guide sequence portion
  source 1..20: mol_type = other RNA
gaagcgaagtgcacacggtc

SEQ ID NO: 3239 - RNA, 20 nt, synthetic construct
  misc_feature 1..20: note = HBV-targeting guide sequence portion
  source 1..20: mol_type = other RNA
gaaggaaagaagtcagaagg

SEQ ID NO: 3240 - RNA, 20 nt, synthetic construct
  misc_feature 1..20: note = HBV-targeting guide sequence portion
  source 1..20: mol_type = other RNA
gaaggcaaaaacgagagtaa

SEQ ID NO: 3241 - RNA, 20 nt, synthetic construct
  misc_feature 1..20: note = HBV-targeting guide sequence portion
  source 1..20: mol_type = other RNA
gaaggcacagacggggagtc

SEQ ID NO: 3242 - RNA, 20 nt, synthetic construct
  misc_feature 1..20: note = HBV-targeting guide sequence portion
  source 1..20: mol_type = other RNA
gaaggcgggtgttttatata

SEQ ID NO: 3243 - RNA, 20 nt, synthetic construct
  misc_feature 1..20: note = HBV-targeting guide sequence portion
  source 1..20: mol_type = other RNA
gaaggctgggtccaactggt

SEQ ID NO: 3244 - RNA, 20 nt, synthetic construct
  misc_feature 1..20: note = HBV-targeting guide sequence portion
  source 1..20: mol_type = other RNA
gaaggttttgtacagcaaca

SEQ ID NO: 3245 - RNA, 20 nt, synthetic construct
  misc_feature 1..20: note = HBV-targeting guide sequence portion
  source 1..20: mol_type = other RNA
gaagtaatgattaactagat

SEQ ID NO: 3246 - RNA, 20 nt, synthetic construct
  misc_feature 1..20: note = HBV-targeting guide sequence portion
  source 1..20: mol_type = other RNA
gaagtatgcctcaaggtcgg

SEQ ID NO: 3247 - RNA, 20 nt, synthetic construct
  misc_feature 1..20: note = HBV-targeting guide sequence portion
  source 1..20: mol_type = other RNA
gaagtcagaaggcaaaaacg

SEQ ID NO: 3248 - RNA, 20 nt, synthetic construct
  misc_feature 1..20: note = HBV-targeting guide sequence portion
  source 1..20: mol_type = other RNA
gaagtccaccacgagtctag

SEQ ID NO: 3249 - RNA, 20 nt, synthetic construct
  misc_feature 1..20: note = HBV-targeting guide sequence portion
  source 1..20: mol_type = other RNA
gaagtcccaatctggattgt

SEQ ID NO: 3250 - RNA, 20 nt, synthetic construct
  misc_feature 1..20: note = HBV-targeting guide sequence portion
  source 1..20: mol_type = other RNA
gaagtgcacacggtccggca

SEQ ID NO: 3251 - RNA, 20 nt, synthetic construct
  misc_feature 1..20: note = HBV-targeting guide sequence portion
  source 1..20: mol_type = other RNA
gaagtgttgataggataggg

SEQ ID NO: 3252 - RNA, 20 nt, synthetic construct
  misc_feature 1..20: note = HBV-targeting guide sequence portion
  source 1..20: mol_type = other RNA
gaataaagccccgtaaaatt

SEQ ID NO: 3253 - RNA, 20 nt, synthetic construct
  misc_feature 1..20: note = HBV-targeting guide sequence portion
  source 1..20: mol_type = other RNA
gaataaccccatctctttgt

SEQ ID NO: 3254 - RNA, 20 nt, synthetic construct
  misc_feature 1..20: note = HBV-targeting guide sequence portion
  source 1..20: mol_type = other RNA
gaatacaggtgcagtttcca

SEQ ID NO: 3255 - RNA, 20 nt, synthetic construct
  misc_feature 1..20: note = HBV-targeting guide sequence portion
  source 1..20: mol_type = other RNA
gaatacatgcatacaagggc

SEQ ID NO: 3256 - RNA, 20 nt, synthetic construct
  misc_feature 1..20: note = HBV-targeting guide sequence portion
  source 1..20: mol_type = other RNA
gaatatggtgacccacagaa

SEQ ID NO: 3257 - RNA, 20 nt, synthetic construct
  misc_feature 1..20: note = HBV-targeting guide sequence portion
  source 1..20: mol_type = other RNA
gaatccacactccaaaagac

SEQ ID NO: 3258 - RNA, 20 nt, synthetic construct
  misc_feature 1..20: note = HBV-targeting guide sequence portion
  source 1..20: mol_type = other RNA
gaatcccagaggattgctgg

SEQ ID NO: 3259 - RNA, 20 nt, synthetic construct
  misc_feature 1..20: note = HBV-targeting guide sequence portion
  source 1..20: mol_type = other RNA
gaatcccgcggacgacccat

SEQ ID NO: 3260 - RNA, 20 nt, synthetic construct
  misc_feature 1..20: note = HBV-targeting guide sequence portion
  source 1..20: mol_type = other RNA
gaatcctcacaataccgcag

SEQ ID NO: 3261 - RNA, 20 nt, synthetic construct
  misc_feature 1..20: note = HBV-targeting guide sequence portion
  source 1..20: mol_type = other RNA
gaatcctgatgtgatgttct

SEQ ID NO: 3262 - RNA, 20 nt, synthetic construct
  misc_feature 1..20: note = HBV-targeting guide sequence portion
  source 1..20: mol_type = other RNA
gaatctttccaccagcaatc

SEQ ID NO: 3263 - RNA, 20 nt, synthetic construct
  misc_feature 1..20: note = HBV-targeting guide sequence portion
  source 1..20: mol_type = other RNA
gaatgaggcgctatgtgttg

SEQ ID NO: 3264 - RNA, 20 nt, synthetic construct
  misc_feature 1..20: note = HBV-targeting guide sequence portion
  source 1..20: mol_type = other RNA
gaatgctccagctcctacct

SEQ ID NO: 3265 - RNA, 20 nt, synthetic construct
  misc_feature 1..20: note = HBV-targeting guide sequence portion
  source 1..20: mol_type = other RNA
gaatgtttcagaaaactccc

SEQ ID NO: 3266 - RNA, 20 nt, synthetic construct
  misc_feature 1..20: note = HBV-targeting guide sequence portion
  source 1..20: mol_type = other RNA
gaatgtttgctccagaccgg

SEQ ID NO: 3267 - RNA, 20 nt, synthetic construct
  misc_feature 1..20: note = HBV-targeting guide sequence portion
  source 1..20: mol_type = other RNA
gaattagaggacagacggga

SEQ ID NO: 3268 - RNA, 20 nt, synthetic construct
  misc_feature 1..20: note = HBV-targeting guide sequence portion
  source 1..20: mol_type = other RNA
gaattgcttgcctgagtgca

SEQ ID NO: 3269 - RNA, 20 nt, synthetic construct
  misc_feature 1..20: note = HBV-targeting guide sequence portion
  source 1..20: mol_type = other RNA
gaattggtgggcgttcacgg

SEQ ID NO: 3270 - RNA, 20 nt, synthetic construct
  misc_feature 1..20: note = HBV-targeting guide sequence portion
  source 1..20: mol_type = other RNA
gaattgtgggtcttctgggt

SEQ ID NO: 3271 - RNA, 20 nt, synthetic construct
  misc_feature 1..20: note = HBV-targeting guide sequence portion
  source 1..20: mol_type = other RNA
gaatttaggataaaacctag

SEQ ID NO: 3272 - RNA, 20 nt, synthetic construct
  misc_feature 1..20: note = HBV-targeting guide sequence portion
  source 1..20: mol_type = other RNA
gaatttggagctactgtgga

SEQ ID NO: 3273 - RNA, 20 nt, synthetic construct
  misc_feature 1..20: note = HBV-targeting guide sequence portion
  source 1..20: mol_type = other RNA
gaattttccgaaagcccagg

SEQ ID NO: 3274 - RNA, 20 nt, synthetic construct
  misc_feature 1..20: note = HBV-targeting guide sequence portion
  source 1..20: mol_type = other RNA
gaattttggccaagacacac

SEQ ID NO: 3275 - RNA, 20 nt, synthetic construct
  misc_feature 1..20: note = HBV-targeting guide sequence portion
  source 1..20: mol_type = other RNA
gacaaaagaaaattggtaac

SEQ ID NO: 3276 - RNA, 20 nt, synthetic construct
  misc_feature 1..20: note = HBV-targeting guide sequence portion
  source 1..20: mol_type = other RNA
gacaacagagttgtcagtcc

SEQ ID NO: 3277 - RNA, 20 nt, synthetic construct
  misc_feature 1..20: note = HBV-targeting guide sequence portion
  source 1..20: mol_type = other RNA
gacaactattgtggtttcac

SEQ ID NO: 3278 - RNA, 20 nt, synthetic construct
  misc_feature 1..20: note = HBV-targeting guide sequence portion
  source 1..20: mol_type = other RNA
gacaactctgttgtcctctc

SEQ ID NO: 3279 - RNA, 20 nt, synthetic construct
  misc_feature 1..20: note = HBV-targeting guide sequence portion
  source 1..20: mol_type = other RNA
gacaagaaatgtgaaaccac

SEQ ID NO: 3280 - RNA, 20 nt, synthetic construct
  misc_feature 1..20: note = HBV-targeting guide sequence portion
  source 1..20: mol_type = other RNA
gacaagaatcctcacaatac

SEQ ID NO: 3281 - RNA, 20 nt, synthetic construct
  misc_feature 1..20: note = HBV-targeting guide sequence portion
  source 1..20: mol_type = other RNA
gacaagttggaggacaggag

SEQ ID NO: 3282 - RNA, 20 nt, synthetic construct
  misc_feature 1..20: note = HBV-targeting guide sequence portion
  source 1..20: mol_type = other RNA
gacacacggtagttccccct

SEQ ID NO: 3283 - RNA, 20 nt, synthetic construct
  misc_feature 1..20: note = HBV-targeting guide sequence portion
  source 1..20: mol_type = other RNA
gacacactttccaatcaata

SEQ ID NO: 3284 - RNA, 20 nt, synthetic construct
  misc_feature 1..20: note = HBV-targeting guide sequence portion
  source 1..20: mol_type = other RNA
gacacatccagcgataacca

SEQ ID NO: 3285 - RNA, 20 nt, synthetic construct
  misc_feature 1..20: note = HBV-targeting guide sequence portion
  source 1..20: mol_type = other RNA
gacaccaaatactctaggac

SEQ ID NO: 3286 - RNA, 20 nt, synthetic construct
  misc_feature 1..20: note = HBV-targeting guide sequence portion
  source 1..20: mol_type = other RNA
gacactatttacacactcta

SEQ ID NO: 3287 - RNA, 20 nt, synthetic construct
  misc_feature 1..20: note = HBV-targeting guide sequence portion
  source 1..20: mol_type = other RNA
gacactctcttatataaaac

SEQ ID NO: 3288 - RNA, 20 nt, synthetic construct
  misc_feature 1..20: note = HBV-targeting guide sequence portion
  source 1..20: mol_type = other RNA
gacagacgggaaacatacct

SEQ ID NO: 3289 - RNA, 20 nt, synthetic construct
  misc_feature 1..20: note = HBV-targeting guide sequence portion
  source 1..20: mol_type = other RNA
gacagcggggtaggctgccg

SEQ ID NO: 3290 - RNA, 20 nt, synthetic construct
  misc_feature 1..20: note = HBV-targeting guide sequence portion
  source 1..20: mol_type = other RNA
gacaggaggttggtgagtga

SEQ ID NO: 3291 - RNA, 20 nt, synthetic construct
  misc_feature 1..20: note = HBV-targeting guide sequence portion
  source 1..20: mol_type = other RNA
gacagggccccaagcggcct

SEQ ID NO: 3292 - RNA, 20 nt, synthetic construct
  misc_feature 1..20: note = HBV-targeting guide sequence portion
  source 1..20: mol_type = other RNA
gacaggtacagtagaagaat

SEQ ID NO: 3293 - RNA, 20 nt, synthetic construct
  misc_feature 1..20: note = HBV-targeting guide sequence portion
  source 1..20: mol_type = other RNA
gacataactgactactaggt

SEQ ID NO: 3294 - RNA, 20 nt, synthetic construct
  misc_feature 1..20: note = HBV-targeting guide sequence portion
  source 1..20: mol_type = other RNA
gacatagcccatgaaattaa

SEQ ID NO: 3295 - RNA, 20 nt, synthetic construct
  misc_feature 1..20: note = HBV-targeting guide sequence portion
  source 1..20: mol_type = other RNA
gacatgaacaagagatgatt

SEQ ID NO: 3296 - RNA, 20 nt, synthetic construct
  misc_feature 1..20: note = HBV-targeting guide sequence portion
  source 1..20: mol_type = other RNA
gacattgacccatataaaga

SEQ ID NO: 3297 - RNA, 20 nt, synthetic construct
  misc_feature 1..20: note = HBV-targeting guide sequence portion
  source 1..20: mol_type = other RNA
gacattgcagagagtccaag

SEQ ID NO: 3298 - RNA, 20 nt, synthetic construct
  misc_feature 1..20: note = HBV-targeting guide sequence portion
  source 1..20: mol_type = other RNA
gaccaagccccaaccagtgg

SEQ ID NO: 3299 - RNA, 20 nt, synthetic construct
  misc_feature 1..20: note = HBV-targeting guide sequence portion
  source 1..20: mol_type = other RNA
gaccaatttatgcctacagc

SEQ ID NO: 3300 - RNA, 20 nt, synthetic construct
  misc_feature 1..20: note = HBV-targeting guide sequence portion
  source 1..20: mol_type = other RNA
gaccaccaaatgcccctatc

SEQ ID NO: 3301 - RNA, 20 nt, synthetic construct
  misc_feature 1..20: note = HBV-targeting guide sequence portion
  source 1..20: mol_type = other RNA
gaccaccagttggacccagc

SEQ ID NO: 3302 - RNA, 20 nt, synthetic construct
  misc_feature 1..20: note = HBV-targeting guide sequence portion
  source 1..20: mol_type = other RNA
gaccaccgtgaacgcccacc

SEQ ID NO: 3303 - RNA, 20 nt, synthetic construct
  misc_feature 1..20: note = HBV-targeting guide sequence portion
  source 1..20: mol_type = other RNA
gaccacggggcgcacctctc

SEQ ID NO: 3304 - RNA, 20 nt, synthetic construct
  misc_feature 1..20: note = HBV-targeting guide sequence portion
  source 1..20: mol_type = other RNA
gacccacaattcgttgacac

SEQ ID NO: 3305 - RNA, 20 nt, synthetic construct
  misc_feature 1..20: note = HBV-targeting guide sequence portion
  source 1..20: mol_type = other RNA
gacccacagaatgaggcgct

SEQ ID NO: 3306 - RNA, 20 nt, synthetic construct
  misc_feature 1..20: note = HBV-targeting guide sequence portion
  source 1..20: mol_type = other RNA
gacccagccttcagagcaaa

SEQ ID NO: 3307 - RNA, 20 nt, synthetic construct
  misc_feature 1..20: note = HBV-targeting guide sequence portion
  source 1..20: mol_type = other RNA
gacccatataaagaatttgg

SEQ ID NO: 3308 - RNA, 20 nt, synthetic construct
  misc_feature 1..20: note = HBV-targeting guide sequence portion
  source 1..20: mol_type = other RNA
gacccatctcgaggccgctt

SEQ ID NO: 3309 - RNA, 20 nt, synthetic construct
  misc_feature 1..20: note = HBV-targeting guide sequence portion
  source 1..20: mol_type = other RNA
gacccctgctcgtgttacag

SEQ ID NO: 3310 - RNA, 20 nt, synthetic construct
  misc_feature 1..20: note = HBV-targeting guide sequence portion
  source 1..20: mol_type = other RNA
gaccctgcagaacctgcacg

SEQ ID NO: 3311 - RNA, 20 nt, synthetic construct
  misc_feature 1..20: note = HBV-targeting guide sequence portion
  source 1..20: mol_type = other RNA
gaccctgcgctgaacatgga

SEQ ID NO: 3312 - RNA, 20 nt, synthetic construct
  misc_feature 1..20: note = HBV-targeting guide sequence portion
  source 1..20: mol_type = other RNA
gaccgaccacggggcgcacc

SEQ ID NO: 3313 - RNA, 20 nt, synthetic construct
  misc_feature 1..20: note = HBV-targeting guide sequence portion
  source 1..20: mol_type = other RNA
gaccgaccttgaggcatact

SEQ ID NO: 3314 - RNA, 20 nt, synthetic construct
  misc_feature 1..20: note = HBV-targeting guide sequence portion
  source 1..20: mol_type = other RNA
gaccggctgcgagcaaaaca

SEQ ID NO: 3315 - RNA, 20 nt, synthetic construct
  misc_feature 1..20: note = HBV-targeting guide sequence portion
  source 1..20: mol_type = other RNA
gaccgtgtgcacttcgcttc

SEQ ID NO: 3316 - RNA, 20 nt, synthetic construct
  misc_feature 1..20: note = HBV-targeting guide sequence portion
  source 1..20: mol_type = other RNA
gaccgtttctcttccaaaag

SEQ ID NO: 3317 - RNA, 20 nt, synthetic construct
  misc_feature 1..20: note = HBV-targeting guide sequence portion
  source 1..20: mol_type = other RNA
gacctagtagtcagttatgt

SEQ ID NO: 3318 - RNA, 20 nt, synthetic construct
  misc_feature 1..20: note = HBV-targeting guide sequence portion
  source 1..20: mol_type = other RNA
gacctgcctcgtcgtctaac

SEQ ID NO: 3319 - RNA, 20 nt, synthetic construct
  misc_feature 1..20: note = HBV-targeting guide sequence portion
  source 1..20: mol_type = other RNA
gacctggccgttgcctggca

SEQ ID NO: 3320 - RNA, 20 nt, synthetic construct
  misc_feature 1..20: note = HBV-targeting guide sequence portion
  source 1..20: mol_type = other RNA
gaccttgaggcatacttcaa

SEQ ID NO: 3321 - RNA, 20 nt, synthetic construct
  misc_feature 1..20: note = HBV-targeting guide sequence portion
  source 1..20: mol_type = other RNA
gaccttgggcaagaattggt

SEQ ID NO: 3322 - RNA, 20 nt, synthetic construct
  misc_feature 1..20: note = HBV-targeting guide sequence portion
  source 1..20: mol_type = other RNA
gacgaagatctcaatcgccg

SEQ ID NO: 3323 - RNA, 20 nt, synthetic construct
  misc_feature 1..20: note = HBV-targeting guide sequence portion
  source 1..20: mol_type = other RNA
gacgacagggccccaagcgg

SEQ ID NO: 3324 - RNA, 20 nt, synthetic construct
  misc_feature 1..20: note = HBV-targeting guide sequence portion
  source 1..20: mol_type = other RNA
gacgacccatctcgaggccg

SEQ ID NO: 3325 - RNA, 20 nt, synthetic construct
  misc_feature 1..20: note = HBV-targeting guide sequence portion
  source 1..20: mol_type = other RNA
gacgacgaggcaggtcccct

SEQ ID NO: 3326 - RNA, 20 nt, synthetic construct
  misc_feature 1..20: note = HBV-targeting guide sequence portion
  source 1..20: mol_type = other RNA
gacgaggcaggtcccctaga

SEQ ID NO: 3327 - RNA, 20 nt, synthetic construct
  misc_feature 1..20: note = HBV-targeting guide sequence portion
  source 1..20: mol_type = other RNA
gacgatatgtgagaggcagt

SEQ ID NO: 3328 - RNA, 20 nt, synthetic construct
  misc_feature 1..20: note = HBV-targeting guide sequence portion
  source 1..20: mol_type = other RNA
gacgccaacaaggtaggagc

SEQ ID NO: 3329 - RNA, 20 nt, synthetic construct
  misc_feature 1..20: note = HBV-targeting guide sequence portion
  source 1..20: mol_type = other RNA
gacgcggcgattgagatctt

SEQ ID NO: 3330 - RNA, 20 nt, synthetic construct
  misc_feature 1..20: note = HBV-targeting guide sequence portion
  source 1..20: mol_type = other RNA
gacggcagcctaccccgctg

SEQ ID NO: 3331 - RNA, 20 nt, synthetic construct
  misc_feature 1..20: note = HBV-targeting guide sequence portion
  source 1..20: mol_type = other RNA
gacgggaaacataccttgat

SEQ ID NO: 3332 - RNA, 20 nt, synthetic construct
  misc_feature 1..20: note = HBV-targeting guide sequence portion
  source 1..20: mol_type = other RNA
gacgggacgtaaacaaagga

SEQ ID NO: 3333 - RNA, 20 nt, synthetic construct
  misc_feature 1..20: note = HBV-targeting guide sequence portion
  source 1..20: mol_type = other RNA
gacggggagtccgcgtaaag

SEQ ID NO: 3334 - RNA, 20 nt, synthetic construct
  misc_feature 1..20: note = HBV-targeting guide sequence portion
  source 1..20: mol_type = other RNA
gacggttgaaattgattatg

SEQ ID NO: 3335 - RNA, 20 nt, synthetic construct
  misc_feature 1..20: note = HBV-targeting guide sequence portion
  source 1..20: mol_type = other RNA
gacgtaaacaaaggacgtcc

SEQ ID NO: 3336 - RNA, 20 nt, synthetic construct
  misc_feature 1..20: note = HBV-targeting guide sequence portion
  source 1..20: mol_type = other RNA
gacgtcccgcgcaggatcca

SEQ ID NO: 3337 - RNA, 20 nt, synthetic construct
  misc_feature 1..20: note = HBV-targeting guide sequence portion
  source 1..20: mol_type = other RNA
gacgtcctttgtttacgtcc

SEQ ID NO: 3338 - RNA, 20 nt, synthetic construct
  misc_feature 1..20: note = HBV-targeting guide sequence portion
  source 1..20: mol_type = other RNA
gacgtgcagaggtgaagcga

SEQ ID NO: 3339 - RNA, 20 nt, synthetic construct
  misc_feature 1..20: note = HBV-targeting guide sequence portion
  source 1..20: mol_type = other RNA
gactactaggtccctagatg

SEQ ID NO: 3340 - RNA, 20 nt, synthetic construct
  misc_feature 1..20: note = HBV-targeting guide sequence portion
  source 1..20: mol_type = other RNA
gactactgcctctcacatat

SEQ ID NO: 3341 - RNA, 20 nt, synthetic construct
  misc_feature 1..20: note = HBV-targeting guide sequence portion
  source 1..20: mol_type = other RNA
gactatcaaggtatgtttcc

SEQ ID NO: 3342 - RNA, 20 nt, synthetic construct
  misc_feature 1..20: note = HBV-targeting guide sequence portion
  source 1..20: mol_type = other RNA
gactcaagatgctgtacaga

SEQ ID NO: 3343 - RNA, 20 nt, synthetic construct
  misc_feature 1..20: note = HBV-targeting guide sequence portion
  source 1..20: mol_type = other RNA
gactcataaggtgggaaatt

SEQ ID NO: 3344 - RNA, 20 nt, synthetic construct
  misc_feature 1..20: note = HBV-targeting guide sequence portion
  source 1..20: mol_type = other RNA
gactccaaggcatcccgata

SEQ ID NO: 3345 - RNA, 20 nt, synthetic construct
  misc_feature 1..20: note = HBV-targeting guide sequence portion
  source 1..20: mol_type = other RNA
gactccccgtctgtgccttc

SEQ ID NO: 3346 - RNA, 20 nt, synthetic construct
  misc_feature 1..20: note = HBV-targeting guide sequence portion
  source 1..20: mol_type = other RNA
gactcctgctcaaggaacct

SEQ ID NO: 3347 - RNA, 20 nt, synthetic construct
  misc_feature 1..20: note = HBV-targeting guide sequence portion
  source 1..20: mol_type = other RNA
gactcgtggtggacttctct

SEQ ID NO: 3348 - RNA, 20 nt, synthetic construct
  misc_feature 1..20: note = HBV-targeting guide sequence portion
  source 1..20: mol_type = other RNA
gactctagctacctgggtgg

SEQ ID NO: 3349 - RNA, 20 nt, synthetic construct
  misc_feature 1..20: note = HBV-targeting guide sequence portion
  source 1..20: mol_type = other RNA
gactctctgcaatgtcaacg

SEQ ID NO: 3350 - RNA, 20 nt, synthetic construct
  misc_feature 1..20: note = HBV-targeting guide sequence portion
  source 1..20: mol_type = other RNA
gactctgcggtattgtgagg

SEQ ID NO: 3351 - RNA, 20 nt, synthetic construct
  misc_feature 1..20: note = HBV-targeting guide sequence portion
  source 1..20: mol_type = other RNA
gactcttggactctctgcaa

SEQ ID NO: 3352 - RNA, 20 nt, synthetic construct
  misc_feature 1..20: note = HBV-targeting guide sequence portion
  source 1..20: mol_type = other RNA
gactgacaactctgttgtcc

SEQ ID NO: 3353 - RNA, 20 nt, synthetic construct
  misc_feature 1..20: note = HBV-targeting guide sequence portion
  source 1..20: mol_type = other RNA
gactgcgaattttggccaag

SEQ ID NO: 3354 - RNA, 20 nt, synthetic construct
  misc_feature 1..20: note = HBV-targeting guide sequence portion
  source 1..20: mol_type = other RNA
gactggcgattggtagaggc

SEQ ID NO: 3355 - RNA, 20 nt, synthetic construct
  misc_feature 1..20: note = HBV-targeting guide sequence portion
  source 1..20: mol_type = other RNA
gactgggaggagttggggga

SEQ ID NO: 3356 - RNA, 20 nt, synthetic construct
  misc_feature 1..20: note = HBV-targeting guide sequence portion
  source 1..20: mol_type = other RNA
gactgtttgtttaaagactg

SEQ ID NO: 3357 - RNA, 20 nt, synthetic construct
  misc_feature 1..20: note = HBV-targeting guide sequence portion
  source 1..20: mol_type = other RNA
gacttcaatcccaacaagga

SEQ ID NO: 3358 - RNA, 20 nt, synthetic construct
  misc_feature 1..20: note = HBV-targeting guide sequence portion
  source 1..20: mol_type = other RNA
gacttctctcaattttctag

SEQ ID NO: 3359 - RNA, 20 nt, synthetic construct
  misc_feature 1..20: note = HBV-targeting guide sequence portion
  source 1..20: mol_type = other RNA
gacttctttccttccgtacg

SEQ ID NO: 3360 - RNA, 20 nt, synthetic construct
  misc_feature 1..20: note = HBV-targeting guide sequence portion
  source 1..20: mol_type = other RNA
gacttggcccccaataccac

SEQ ID NO: 3361 - RNA, 20 nt, synthetic construct
  misc_feature 1..20: note = HBV-targeting guide sequence portion
  source 1..20: mol_type = other RNA
gacttgtgttgttagacgac

SEQ ID NO: 3362 - RNA, 20 nt, synthetic construct
  misc_feature 1..20: note = HBV-targeting guide sequence portion
  source 1..20: mol_type = other RNA
gagaaaagacggttgaaatt

SEQ ID NO: 3363 - RNA, 20 nt, synthetic construct
  misc_feature 1..20: note = HBV-targeting guide sequence portion
  source 1..20: mol_type = other RNA
gagaaacactcatcctcagg

SEQ ID NO: 3364 - RNA, 20 nt, synthetic construct
  misc_feature 1..20: note = HBV-targeting guide sequence portion
  source 1..20: mol_type = other RNA
gagaaacgggctgaggccca

SEQ ID NO: 3365 - RNA, 20 nt, synthetic construct
  misc_feature 1..20: note = HBV-targeting guide sequence portion
  source 1..20: mol_type = other RNA
gagaaacggtcctagagtat

SEQ ID NO: 3366 - RNA, 20 nt, synthetic construct
  misc_feature 1..20: note = HBV-targeting guide sequence portion
  source 1..20: mol_type = other RNA
gagaacatcacatcaggatt

SEQ ID NO: 3367 - RNA, 20 nt, synthetic construct
  misc_feature 1..20: note = HBV-targeting guide sequence portion
  source 1..20: mol_type = other RNA
gagaactaatgactctagct

SEQ ID NO: 3368 - RNA, 20 nt, synthetic construct
  misc_feature 1..20: note = HBV-targeting guide sequence portion
  source 1..20: mol_type = other RNA
gagaagaggacgacagggcc

SEQ ID NO: 3369 - RNA, 20 nt, synthetic construct
  misc_feature 1..20: note = HBV-targeting guide sequence portion
  source 1..20: mol_type = other RNA
gagaagattgacgatatgtg

SEQ ID NO: 3370 - RNA, 20 nt, synthetic construct
  misc_feature 1..20: note = HBV-targeting guide sequence portion
  source 1..20: mol_type = other RNA
gagaaggcacagacggggag

SEQ ID NO: 3371 - RNA, 20 nt, synthetic construct
  misc_feature 1..20: note = HBV-targeting guide sequence portion
  source 1..20: mol_type = other RNA
gagaagtccaccacgagtct

SEQ ID NO: 3372 - RNA, 20 nt, synthetic construct
  misc_feature 1..20: note = HBV-targeting guide sequence portion
  source 1..20: mol_type = other RNA
gagaataaccccatctcttt

SEQ ID NO: 3373 - RNA, 20 nt, synthetic construct
  misc_feature 1..20: note = HBV-targeting guide sequence portion
  source 1..20: mol_type = other RNA
gagaatgtttgctccagacc

SEQ ID NO: 3374 - RNA, 20 nt, synthetic construct
  misc_feature 1..20: note = HBV-targeting guide sequence portion
  source 1..20: mol_type = other RNA
gagacagcggggtaggctgc

SEQ ID NO: 3375 - RNA, 20 nt, synthetic construct
  misc_feature 1..20: note = HBV-targeting guide sequence portion
  source 1..20: mol_type = other RNA
gagaccaccgtgaacgccca

SEQ ID NO: 3376 - RNA, 20 nt, synthetic construct
  misc_feature 1..20: note = HBV-targeting guide sequence portion
  source 1..20: mol_type = other RNA
gagactccaaggcatcccga

SEQ ID NO: 3377 - RNA, 20 nt, synthetic construct
  misc_feature 1..20: note = HBV-targeting guide sequence portion
  source 1..20: mol_type = other RNA
gagacttgtgttgttagacg

SEQ ID NO: 3378 - RNA, 20 nt, synthetic construct
  misc_feature 1..20: note = HBV-targeting guide sequence portion
  source 1..20: mol_type = other RNA
gagagaagtccaccacgagt

SEQ ID NO: 3379 - RNA, 20 nt, synthetic construct
  misc_feature 1..20: note = HBV-targeting guide sequence portion
  source 1..20: mol_type = other RNA
gagaggacaacagagttgtc

SEQ ID NO: 3380 - RNA, 20 nt, synthetic construct
  misc_feature 1..20: note = HBV-targeting guide sequence portion
  source 1..20: mol_type = other RNA
gagaggcagtagtcggaaca

SEQ ID NO: 3381 - RNA, 20 nt, synthetic construct
  misc_feature 1..20: note = HBV-targeting guide sequence portion
  source 1..20: mol_type = other RNA
gagaggcctgtatctccctg

SEQ ID NO: 3382 - RNA, 20 nt, synthetic construct
  misc_feature 1..20: note = HBV-targeting guide sequence portion
  source 1..20: mol_type = other RNA
gagaggtgcgccccgtggtc

SEQ ID NO: 3383 - RNA, 20 nt, synthetic construct
  misc_feature 1..20: note = HBV-targeting guide sequence portion
  source 1..20: mol_type = other RNA
gagagtaactccacagtagc

SEQ ID NO: 3384 - RNA, 20 nt, synthetic construct
  misc_feature 1..20: note = HBV-targeting guide sequence portion
  source 1..20: mol_type = other RNA
gagagtccaagagtcctctt

SEQ ID NO: 3385 - RNA, 20 nt, synthetic construct
  misc_feature 1..20: note = HBV-targeting guide sequence portion
  source 1..20: mol_type = other RNA
gagagtgtcaacacatagcg

SEQ ID NO: 3386 - RNA, 20 nt, synthetic construct
  misc_feature 1..20: note = HBV-targeting guide sequence portion
  source 1..20: mol_type = other RNA
gagatacaggcctctcactc

SEQ ID NO: 3387 - RNA, 20 nt, synthetic construct
  misc_feature 1..20: note = HBV-targeting guide sequence portion
  source 1..20: mol_type = other RNA
gagatccccgagattgagat

SEQ ID NO: 3388 - RNA, 20 nt, synthetic construct
  misc_feature 1..20: note = HBV-targeting guide sequence portion
  source 1..20: mol_type = other RNA
gagatcttcgtctgcgaggc

SEQ ID NO: 3389 - RNA, 20 nt, synthetic construct
  misc_feature 1..20: note = HBV-targeting guide sequence portion
  source 1..20: mol_type = other RNA
gagatcttctagataccgcc

SEQ ID NO: 3390 - RNA, 20 nt, synthetic construct
  misc_feature 1..20: note = HBV-targeting guide sequence portion
  source 1..20: mol_type = other RNA
gagatcttctgcgacgcggc

SEQ ID NO: 3391 - RNA, 20 nt, synthetic construct
  misc_feature 1..20: note = HBV-targeting guide sequence portion
  source 1..20: mol_type = other RNA
gagatgattaggcagaggtg

SEQ ID NO: 3392 - RNA, 20 nt, synthetic construct
  misc_feature 1..20: note = HBV-targeting guide sequence portion
  source 1..20: mol_type = other RNA
gagatggggttattctctta

SEQ ID NO: 3393 - RNA, 20 nt, synthetic construct
  misc_feature 1..20: note = HBV-targeting guide sequence portion
  source 1..20: mol_type = other RNA
gagatgggtcgtccgcggga

SEQ ID NO: 3394 - RNA, 20 nt, synthetic construct
  misc_feature 1..20: note = HBV-targeting guide sequence portion
  source 1..20: mol_type = other RNA
gagattagattaatgatctt

SEQ ID NO: 3395 - RNA, 20 nt, synthetic construct
  misc_feature 1..20: note = HBV-targeting guide sequence portion
  source 1..20: mol_type = other RNA
gagattgagatcttctgcga

SEQ ID NO: 3396 - RNA, 20 nt, synthetic construct
  misc_feature 1..20: note = HBV-targeting guide sequence portion
  source 1..20: mol_type = other RNA
gagcaaaacaagcggctagg

SEQ ID NO: 3397 - RNA, 20 nt, synthetic construct
  misc_feature 1..20: note = HBV-targeting guide sequence portion
  source 1..20: mol_type = other RNA
gagcaaacattctcgggact

SEQ ID NO: 3398 - RNA, 20 nt, synthetic construct
  misc_feature 1..20: note = HBV-targeting guide sequence portion
  source 1..20: mol_type = other RNA
gagcaaactccaacaatcca

SEQ ID NO: 3399 - RNA, 20 nt, synthetic construct
  misc_feature 1..20: note = HBV-targeting guide sequence portion
  source 1..20: mol_type = other RNA
gagcaggagtcgtgcaggtt

SEQ ID NO: 3400 - RNA, 20 nt, synthetic construct
  misc_feature 1..20: note = HBV-targeting guide sequence portion
  source 1..20: mol_type = other RNA
gagcaggggtcctaggaatc

SEQ ID NO: 3401 - RNA, 20 nt, synthetic construct
  misc_feature 1..20: note = HBV-targeting guide sequence portion
  source 1..20: mol_type = other RNA
gagcattcgggctagggttc

SEQ ID NO: 3402 - RNA, 20 nt, synthetic construct
  misc_feature 1..20: note = HBV-targeting guide sequence portion
  source 1..20: mol_type = other RNA
gagcattgttcacctcacca

SEQ ID NO: 3403 - RNA, 20 nt, synthetic construct
  misc_feature 1..20: note = HBV-targeting guide sequence portion
  source 1..20: mol_type = other RNA
gagccaagagaaacgggctg

SEQ ID NO: 3404 - RNA, 20 nt, synthetic construct
  misc_feature 1..20: note = HBV-targeting guide sequence portion
  source 1..20: mol_type = other RNA
gagccaccagcagggagata

SEQ ID NO: 3405 - RNA, 20 nt, synthetic construct
  misc_feature 1..20: note = HBV-targeting guide sequence portion
  source 1..20: mol_type = other RNA
gagccctcaggctcagggca

SEQ ID NO: 3406 - RNA, 20 nt, synthetic construct
  misc_feature 1..20: note = HBV-targeting guide sequence portion
  source 1..20: mol_type = other RNA
gagccggaaaggttccacgc

SEQ ID NO: 3407 - RNA, 20 nt, synthetic construct
  misc_feature 1..20: note = HBV-targeting guide sequence portion
  source 1..20: mol_type = other RNA
gagcctgagggctccacccc

SEQ ID NO: 3408 - RNA, 20 nt, synthetic construct
  misc_feature 1..20: note = HBV-targeting guide sequence portion
  source 1..20: mol_type = other RNA
gagctacagcatggggcaga

SEQ ID NO: 3409 - RNA, 20 nt, synthetic construct
  misc_feature 1..20: note = HBV-targeting guide sequence portion
  source 1..20: mol_type = other RNA
gagctactgtggagttactc

SEQ ID NO: 3410 - RNA, 20 nt, synthetic construct
  misc_feature 1..20: note = HBV-targeting guide sequence portion
  source 1..20: mol_type = other RNA
gagctgcggcggtatctaga

SEQ ID NO: 3411 - RNA, 20 nt, synthetic construct
  misc_feature 1..20: note = HBV-targeting guide sequence portion
  source 1..20: mol_type = other RNA
gagctggagcattcgggcta

SEQ ID NO: 3412 - RNA, 20 nt, synthetic construct
  misc_feature 1..20: note = HBV-targeting guide sequence portion
  source 1..20: mol_type = other RNA
gaggaagatgataaaacgcc

SEQ ID NO: 3413 - RNA, 20 nt, synthetic construct
  misc_feature 1..20: note = HBV-targeting guide sequence portion
  source 1..20: mol_type = other RNA
gaggacaacagagttgtcag

SEQ ID NO: 3414 - RNA, 20 nt, synthetic construct
  misc_feature 1..20: note = HBV-targeting guide sequence portion
  source 1..20: mol_type = other RNA
gaggacagacgggaaacata

SEQ ID NO: 3415 - RNA, 20 nt, synthetic construct
  misc_feature 1..20: note = HBV-targeting guide sequence portion
  source 1..20: mol_type = other RNA
gaggacaggaggttggtgag

SEQ ID NO: 3416 - RNA, 20 nt, synthetic construct
  misc_feature 1..20: note = HBV-targeting guide sequence portion
  source 1..20: mol_type = other RNA
gaggacgacagggccccaag

SEQ ID NO: 3417 - RNA, 20 nt, synthetic construct
  misc_feature 1..20: note = HBV-targeting guide sequence portion
  source 1..20: mol_type = other RNA
gaggactcttggactctctg

SEQ ID NO: 3418 - RNA, 20 nt, synthetic construct
  misc_feature 1..20: note = HBV-targeting guide sequence portion
  source 1..20: mol_type = other RNA
gaggagattagattaatgat

SEQ ID NO: 3419 - RNA, 20 nt, synthetic construct
  misc_feature 1..20: note = HBV-targeting guide sequence portion
  source 1..20: mol_type = other RNA
gaggagccggaaaggttcca

SEQ ID NO: 3420 - RNA, 20 nt, synthetic construct
  misc_feature 1..20: note = HBV-targeting guide sequence portion
  source 1..20: mol_type = other RNA
gaggagtgcgaatccacact

SEQ ID NO: 3421 - RNA, 20 nt, synthetic construct
  misc_feature 1..20: note = HBV-targeting guide sequence portion
  source 1..20: mol_type = other RNA
gaggagttgggggaggagat

SEQ ID NO: 3422 - RNA, 20 nt, synthetic construct
  misc_feature 1..20: note = HBV-targeting guide sequence portion
  source 1..20: mol_type = other RNA
gaggatgagtgtttctcaga

SEQ ID NO: 3423 - RNA, 20 nt, synthetic construct
  misc_feature 1..20: note = HBV-targeting guide sequence portion
  source 1..20: mol_type = other RNA
gaggattcttgtcaacaagg

SEQ ID NO: 3424 - RNA, 20 nt, synthetic construct
  misc_feature 1..20: note = HBV-targeting guide sequence portion
  source 1..20: mol_type = other RNA
gaggattgctggtggaaaga

SEQ ID NO: 3425 - RNA, 20 nt, synthetic construct
  misc_feature 1..20: note = HBV-targeting guide sequence portion
  source 1..20: mol_type = other RNA
gaggattggggaccctgcgc

SEQ ID NO: 3426 - RNA, 20 nt, synthetic construct
  misc_feature 1..20: note = HBV-targeting guide sequence portion
  source 1..20: mol_type = other RNA
gaggcaggaggcggatttgc

SEQ ID NO: 3427 - RNA, 20 nt, synthetic construct
  misc_feature 1..20: note = HBV-targeting guide sequence portion
  source 1..20: mol_type = other RNA
gaggcaggtcccctagaaga

SEQ ID NO: 3428 - RNA, 20 nt, synthetic construct
  misc_feature 1..20: note = HBV-targeting guide sequence portion
  source 1..20: mol_type = other RNA
gaggcagtagtcggaacagg

SEQ ID NO: 3429 - RNA, 20 nt, synthetic construct
  misc_feature 1..20: note = HBV-targeting guide sequence portion
  source 1..20: mol_type = other RNA
gaggcatacttcaaagactg

SEQ ID NO: 3430 - RNA, 20 nt, synthetic construct
  misc_feature 1..20: note = HBV-targeting guide sequence portion
  source 1..20: mol_type = other RNA
gaggcatagcagcaggatga

SEQ ID NO: 3431 - RNA, 20 nt, synthetic construct
  misc_feature 1..20: note = HBV-targeting guide sequence portion
  source 1..20: mol_type = other RNA
gaggcccactcccataggaa

SEQ ID NO: 3432 - RNA, 20 nt, synthetic construct
  misc_feature 1..20: note = HBV-targeting guide sequence portion
  source 1..20: mol_type = other RNA
gaggccgcttggggccctgt

SEQ ID NO: 3433 - RNA, 20 nt, synthetic construct
  misc_feature 1..20: note = HBV-targeting guide sequence portion
  source 1..20: mol_type = other RNA
gaggcctgtatctccctgct

SEQ ID NO: 3434 - RNA, 20 nt, synthetic construct
  misc_feature 1..20: note = HBV-targeting guide sequence portion
  source 1..20: mol_type = other RNA
gaggccttttggggtggagc

SEQ ID NO: 3435 - RNA, 20 nt, synthetic construct
  misc_feature 1..20: note = HBV-targeting guide sequence portion
  source 1..20: mol_type = other RNA
gaggcgagggagttcttctt

SEQ ID NO: 3436 - RNA, 20 nt, synthetic construct
  misc_feature 1..20: note = HBV-targeting guide sequence portion
  source 1..20: mol_type = other RNA
gaggcgctatgtgttgacac

SEQ ID NO: 3437 - RNA, 20 nt, synthetic construct
  misc_feature 1..20: note = HBV-targeting guide sequence portion
  source 1..20: mol_type = other RNA
gaggcggatttgctggcaag

SEQ ID NO: 3438 - RNA, 20 nt, synthetic construct
  misc_feature 1..20: note = HBV-targeting guide sequence portion
  source 1..20: mol_type = other RNA
gaggctgtaggcataaattg

SEQ ID NO: 3439 - RNA, 20 nt, synthetic construct
  misc_feature 1..20: note = HBV-targeting guide sequence portion
  source 1..20: mol_type = other RNA
gaggcttgaacagtaggaca

SEQ ID NO: 3440 - RNA, 20 nt, synthetic construct
  misc_feature 1..20: note = HBV-targeting guide sequence portion
  source 1..20: mol_type = other RNA
gagggagttcttcttctagg

SEQ ID NO: 3441 - RNA, 20 nt, synthetic construct
  misc_feature 1..20: note = HBV-targeting guide sequence portion
  source 1..20: mol_type = other RNA
gagggatacatagaggttcc

SEQ ID NO: 3442 - RNA, 20 nt, synthetic construct
  misc_feature 1..20: note = HBV-targeting guide sequence portion
  source 1..20: mol_type = other RNA
gagggctccaccccaaaagg

SEQ ID NO: 3443 - RNA, 20 nt, synthetic construct
  misc_feature 1..20: note = HBV-targeting guide sequence portion
  source 1..20: mol_type = other RNA
gagggtgttttccaatgagg

SEQ ID NO: 3444 - RNA, 20 nt, synthetic construct
  misc_feature 1..20: note = HBV-targeting guide sequence portion
  source 1..20: mol_type = other RNA
gagggttaaagacaggtaca

SEQ ID NO: 3445 - RNA, 20 nt, synthetic construct
  misc_feature 1..20: note = HBV-targeting guide sequence portion
  source 1..20: mol_type = other RNA
gaggtgaaaaagttgcatgg

SEQ ID NO: 3446 - RNA, 20 nt, synthetic construct
  misc_feature 1..20: note = HBV-targeting guide sequence portion
  source 1..20: mol_type = other RNA
gaggtgaacaatgctcagga

SEQ ID NO: 3447 - RNA, 20 nt, synthetic construct
  misc_feature 1..20: note = HBV-targeting guide sequence portion
  source 1..20: mol_type = other RNA
gaggtgaagcgaagtgcaca

SEQ ID NO: 3448 - RNA, 20 nt, synthetic construct
  misc_feature 1..20: note = HBV-targeting guide sequence portion
  source 1..20: mol_type = other RNA
gaggtgcgccccgtggtcgg

SEQ ID NO: 3449 - RNA, 20 nt, synthetic construct
  misc_feature 1..20: note = HBV-targeting guide sequence portion
  source 1..20: mol_type = other RNA
gaggtggagacagcggggta

SEQ ID NO: 3450 - RNA, 20 nt, synthetic construct
  misc_feature 1..20: note = HBV-targeting guide sequence portion
  source 1..20: mol_type = other RNA
gaggttccttgagcaggagt

SEQ ID NO: 3451 - RNA, 20 nt, synthetic construct
  misc_feature 1..20: note = HBV-targeting guide sequence portion
  source 1..20: mol_type = other RNA
gaggttggggactgcgaatt

SEQ ID NO: 3452 - RNA, 20 nt, synthetic construct
  misc_feature 1..20: note = HBV-targeting guide sequence portion
  source 1..20: mol_type = other RNA
gaggttggtgagtgattgga

SEQ ID NO: 3453 - RNA, 20 nt, synthetic construct
  misc_feature 1..20: note = HBV-targeting guide sequence portion
  source 1..20: mol_type = other RNA
gagtaactccacagtagctc

SEQ ID NO: 3454 - RNA, 20 nt, synthetic construct
  misc_feature 1..20: note = HBV-targeting guide sequence portion
  source 1..20: mol_type = other RNA
gagtatttggtgtcttttgg

SEQ ID NO: 3455 - RNA, 20 nt, synthetic construct
  misc_feature 1..20: note = HBV-targeting guide sequence portion
  source 1..20: mol_type = other RNA
gagtcattagttctccccag

SEQ ID NO: 3456 - RNA, 20 nt, synthetic construct
  misc_feature 1..20: note = HBV-targeting guide sequence portion
  source 1..20: mol_type = other RNA
gagtccaagagtcctcttat

SEQ ID NO: 3457 - RNA, 20 nt, synthetic construct
  misc_feature 1..20: note = HBV-targeting guide sequence portion
  source 1..20: mol_type = other RNA
gagtccaagggatactaaca

SEQ ID NO: 3458 - RNA, 20 nt, synthetic construct
  misc_feature 1..20: note = HBV-targeting guide sequence portion
  source 1..20: mol_type = other RNA
gagtccctttataccgctgt

SEQ ID NO: 3459 - RNA, 20 nt, synthetic construct
  misc_feature 1..20: note = HBV-targeting guide sequence portion
  source 1..20: mol_type = other RNA
gagtccgcgtaaagagaggt

SEQ ID NO: 3460 - RNA, 20 nt, synthetic construct
  misc_feature 1..20: note = HBV-targeting guide sequence portion
  source 1..20: mol_type = other RNA
gagtcctcttatgtaagacc

SEQ ID NO: 3461 - RNA, 20 nt, synthetic construct
  misc_feature 1..20: note = HBV-targeting guide sequence portion
  source 1..20: mol_type = other RNA
gagtcgtgcaggttctgcag

SEQ ID NO: 3462 - RNA, 20 nt, synthetic construct
  misc_feature 1..20: note = HBV-targeting guide sequence portion
  source 1..20: mol_type = other RNA
gagtctagactcgtggtgga

SEQ ID NO: 3463 - RNA, 20 nt, synthetic construct
  misc_feature 1..20: note = HBV-targeting guide sequence portion
  source 1..20: mol_type = other RNA
gagtctagactctgcggtat

SEQ ID NO: 3464 - RNA, 20 nt, synthetic construct
  misc_feature 1..20: note = HBV-targeting guide sequence portion
  source 1..20: mol_type = other RNA
gagtctcctgagcattgttc

SEQ ID NO: 3465 - RNA, 20 nt, synthetic construct
  misc_feature 1..20: note = HBV-targeting guide sequence portion
  source 1..20: mol_type = other RNA
gagtgagaggcctgtatctc

SEQ ID NO: 3466 - RNA, 20 nt, synthetic construct
  misc_feature 1..20: note = HBV-targeting guide sequence portion
  source 1..20: mol_type = other RNA
gagtgattggaggttgggga

SEQ ID NO: 3467 - RNA, 20 nt, synthetic construct
  misc_feature 1..20: note = HBV-targeting guide sequence portion
  source 1..20: mol_type = other RNA
gagtgcagtatggtgaggtg

SEQ ID NO: 3468 - RNA, 20 nt, synthetic construct
  misc_feature 1..20: note = HBV-targeting guide sequence portion
  source 1..20: mol_type = other RNA
gagtgcgaatccacactcca

SEQ ID NO: 3469 - RNA, 20 nt, synthetic construct
  misc_feature 1..20: note = HBV-targeting guide sequence portion
  source 1..20: mol_type = other RNA
gagtgggcctcagcccgttt

SEQ ID NO: 3470 - RNA, 20 nt, synthetic construct
  misc_feature 1..20: note = HBV-targeting guide sequence portion
  source 1..20: mol_type = other RNA
gagtgtcaacacatagcgcc

SEQ ID NO: 3471 - RNA, 20 nt, synthetic construct
  misc_feature 1..20: note = HBV-targeting guide sequence portion
  source 1..20: mol_type = other RNA
gagtgtggattcgcactcct

SEQ ID NO: 3472 - RNA, 20 nt, synthetic construct
  misc_feature 1..20: note = HBV-targeting guide sequence portion
  source 1..20: mol_type = other RNA
gagtgtgtaaatagtgtcta

SEQ ID NO: 3473 - RNA, 20 nt, synthetic construct
  misc_feature 1..20: note = HBV-targeting guide sequence portion
  source 1..20: mol_type = other RNA
gagtgttgacataactgact

SEQ ID NO: 3474 - RNA, 20 nt, synthetic construct
  misc_feature 1..20: note = HBV-targeting guide sequence portion
  source 1..20: mol_type = other RNA
gagtgtttctcagaggtgga

SEQ ID NO: 3475 - RNA, 20 nt, synthetic construct
  misc_feature 1..20: note = HBV-targeting guide sequence portion
  source 1..20: mol_type = other RNA
gagttactctcgtttttgcc

SEQ ID NO: 3476 - RNA, 20 nt, synthetic construct
  misc_feature 1..20: note = HBV-targeting guide sequence portion
  source 1..20: mol_type = other RNA
gagttccgcagtatggatcg

SEQ ID NO: 3477 - RNA, 20 nt, synthetic construct
  misc_feature 1..20: note = HBV-targeting guide sequence portion
  source 1..20: mol_type = other RNA
gagttcttcttctaggggac

SEQ ID NO: 3478 - RNA, 20 nt, synthetic construct
  misc_feature 1..20: note = HBV-targeting guide sequence portion
  source 1..20: mol_type = other RNA
gagttgggggaggagattag

SEQ ID NO: 3479 - RNA, 20 nt, synthetic construct
  misc_feature 1..20: note = HBV-targeting guide sequence portion
  source 1..20: mol_type = other RNA
gagttgtcagtcccgagaat

SEQ ID NO: 3480 - RNA, 20 nt, synthetic construct
  misc_feature 1..20: note = HBV-targeting guide sequence portion
  source 1..20: mol_type = other RNA
gagtttgctctgaaggctgg

SEQ ID NO: 3481 - RNA, 20 nt, synthetic construct
  misc_feature 1..20: note = HBV-targeting guide sequence portion
  source 1..20: mol_type = other RNA
gagttttctgaaacattctt

SEQ ID NO: 3482 - RNA, 20 nt, synthetic construct
  misc_feature 1..20: note = HBV-targeting guide sequence portion
  source 1..20: mol_type = other RNA
gataaaacctagcaggcata

SEQ ID NO: 3483 - RNA, 20 nt, synthetic construct
  misc_feature 1..20: note = HBV-targeting guide sequence portion
  source 1..20: mol_type = other RNA
gataaaacgccgcagacaca

SEQ ID NO: 3484 - RNA, 20 nt, synthetic construct
  misc_feature 1..20: note = HBV-targeting guide sequence portion
  source 1..20: mol_type = other RNA
gataaccacattgtgtaaaa

SEQ ID NO: 3485 - RNA, 20 nt, synthetic construct
  misc_feature 1..20: note = HBV-targeting guide sequence portion
  source 1..20: mol_type = other RNA
gataaccaggacaagttgga

SEQ ID NO: 3486 - RNA, 20 nt, synthetic construct
  misc_feature 1..20: note = HBV-targeting guide sequence portion
  source 1..20: mol_type = other RNA
gataagggtattaaacctta

SEQ ID NO: 3487 - RNA, 20 nt, synthetic construct
  misc_feature 1..20: note = HBV-targeting guide sequence portion
  source 1..20: mol_type = other RNA
gataataaggtttaataccc

SEQ ID NO: 3488 - RNA, 20 nt, synthetic construct
  misc_feature 1..20: note = HBV-targeting guide sequence portion
  source 1..20: mol_type = other RNA
gataatatcttggtgtagat

SEQ ID NO: 3489 - RNA, 20 nt, synthetic construct
  misc_feature 1..20: note = HBV-targeting guide sequence portion
  source 1..20: mol_type = other RNA
gatacagagctgcggcggta

SEQ ID NO: 3490 - RNA, 20 nt, synthetic construct
  misc_feature 1..20: note = HBV-targeting guide sequence portion
  source 1..20: mol_type = other RNA
gatacaggcctctcactctg

SEQ ID NO: 3491 - RNA, 20 nt, synthetic construct
  misc_feature 1..20: note = HBV-targeting guide sequence portion
  source 1..20: mol_type = other RNA
gatacatagaggttccttga

SEQ ID NO: 3492 - RNA, 20 nt, synthetic construct
  misc_feature 1..20: note = HBV-targeting guide sequence portion
  source 1..20: mol_type = other RNA
gataccgccgcagctctgta

SEQ ID NO: 3493 - RNA, 20 nt, synthetic construct
  misc_feature 1..20: note = HBV-targeting guide sequence portion
  source 1..20: mol_type = other RNA
gatactaacattgagatccc

SEQ ID NO: 3494 - RNA, 20 nt, synthetic construct
  misc_feature 1..20: note = HBV-targeting guide sequence portion
  source 1..20: mol_type = other RNA
gataggataggggcatttgg

SEQ ID NO: 3495 - RNA, 20 nt, synthetic construct
  misc_feature 1..20: note = HBV-targeting guide sequence portion
  source 1..20: mol_type = other RNA
gataggggcatttggtggtc

SEQ ID NO: 3496 - RNA, 20 nt, synthetic construct
  misc_feature 1..20: note = HBV-targeting guide sequence portion
  source 1..20: mol_type = other RNA
gatagtccagaagaaccaac

SEQ ID NO: 3497 - RNA, 20 nt, synthetic construct
  misc_feature 1..20: note = HBV-targeting guide sequence portion
  source 1..20: mol_type = other RNA
gatatgtgagaggcagtagt

SEQ ID NO: 3498 - RNA, 20 nt, synthetic construct
  misc_feature 1..20: note = HBV-targeting guide sequence portion
  source 1..20: mol_type = other RNA
gatattatcaaaaaatgtga

SEQ ID NO: 3499 - RNA, 20 nt, synthetic construct
  misc_feature 1..20: note = HBV-targeting guide sequence portion
  source 1..20: mol_type = other RNA
gatcaagcatctagggacct

SEQ ID NO: 3500 - RNA, 20 nt, synthetic construct
  misc_feature 1..20: note = HBV-targeting guide sequence portion
  source 1..20: mol_type = other RNA
gatcatcaaccaccagcacg

SEQ ID NO: 3501 - RNA, 20 nt, synthetic construct
  misc_feature 1..20: note = HBV-targeting guide sequence portion
  source 1..20: mol_type = other RNA
gatcattaatctaatctcct

SEQ ID NO: 3502 - RNA, 20 nt, synthetic construct
  misc_feature 1..20: note = HBV-targeting guide sequence portion
  source 1..20: mol_type = other RNA
gatcattgccacaaaatcac

SEQ ID NO: 3503 - RNA, 20 nt, synthetic construct
  misc_feature 1..20: note = HBV-targeting guide sequence portion
  source 1..20: mol_type = other RNA
gatccagttggcagcacagc

SEQ ID NO: 3504 - RNA, 20 nt, synthetic construct
  misc_feature 1..20: note = HBV-targeting guide sequence portion
  source 1..20: mol_type = other RNA
gatccatactgcggaactcc

SEQ ID NO: 3505 - RNA, 20 nt, synthetic construct
  misc_feature 1..20: note = HBV-targeting guide sequence portion
  source 1..20: mol_type = other RNA
gatcccagagtgagaggcct

SEQ ID NO: 3506 - RNA, 20 nt, synthetic construct
  misc_feature 1..20: note = HBV-targeting guide sequence portion
  source 1..20: mol_type = other RNA
gatccccaacaatcaatgac

SEQ ID NO: 3507 - RNA, 20 nt, synthetic construct
  misc_feature 1..20: note = HBV-targeting guide sequence portion
  source 1..20: mol_type = other RNA
gatccccgagattgagatct

SEQ ID NO: 3508 - RNA, 20 nt, synthetic construct
  misc_feature 1..20: note = HBV-targeting guide sequence portion
  source 1..20: mol_type = other RNA
gatccctggccagacgccaa

SEQ ID NO: 3509 - RNA, 20 nt, synthetic construct
  misc_feature 1..20: note = HBV-targeting guide sequence portion
  source 1..20: mol_type = other RNA
gatcctgcgcgggacgtcct

SEQ ID NO: 3510 - RNA, 20 nt, synthetic construct
  misc_feature 1..20: note = HBV-targeting guide sequence portion
  source 1..20: mol_type = other RNA
gatcctggaattagaggaca

SEQ ID NO: 3511 - RNA, 20 nt, synthetic construct
  misc_feature 1..20: note = HBV-targeting guide sequence portion
  source 1..20: mol_type = other RNA
gatccttgttgggattgaag

SEQ ID NO: 3512 - RNA, 20 nt, synthetic construct
  misc_feature 1..20: note = HBV-targeting guide sequence portion
  source 1..20: mol_type = other RNA
gatcggcagaggagccggaa

SEQ ID NO: 3513 - RNA, 20 nt, synthetic construct
  misc_feature 1..20: note = HBV-targeting guide sequence portion
  source 1..20: mol_type = other RNA
gatctcaatcgccgcgtcgc

SEQ ID NO: 3514 - RNA, 20 nt, synthetic construct
  misc_feature 1..20: note = HBV-targeting guide sequence portion
  source 1..20: mol_type = other RNA
gatctcaatctcggggatct

SEQ ID NO: 3515 - RNA, 20 nt, synthetic construct
  misc_feature 1..20: note = HBV-targeting guide sequence portion
  source 1..20: mol_type = other RNA
gatctcaatgttagtatccc

SEQ ID NO: 3516 - RNA, 20 nt, synthetic construct
  misc_feature 1..20: note = HBV-targeting guide sequence portion
  source 1..20: mol_type = other RNA
gatctcgtacggaaggaaag

SEQ ID NO: 3517 - RNA, 20 nt, synthetic construct
  misc_feature 1..20: note = HBV-targeting guide sequence portion
  source 1..20: mol_type = other RNA
gatcttcgtctgcgaggcga

SEQ ID NO: 3518 - RNA, 20 nt, synthetic construct
  misc_feature 1..20: note = HBV-targeting guide sequence portion
  source 1..20: mol_type = other RNA
gatcttctaaattagtaccc

SEQ ID NO: 3519 - RNA, 20 nt, synthetic construct
  misc_feature 1..20: note = HBV-targeting guide sequence portion
  source 1..20: mol_type = other RNA
gatcttctagataccgccgc

SEQ ID NO: 3520 - RNA, 20 nt, synthetic construct
  misc_feature 1..20: note = HBV-targeting guide sequence portion
  source 1..20: mol_type = other RNA
gatcttctgcgacgcggcga

SEQ ID NO: 3521 - RNA, 20 nt, synthetic construct
  misc_feature 1..20: note = HBV-targeting guide sequence portion
  source 1..20: mol_type = other RNA
gatcttgcagagtttggtgg

SEQ ID NO: 3522 - RNA, 20 nt, synthetic construct
  misc_feature 1..20: note = HBV-targeting guide sequence portion
  source 1..20: mol_type = other RNA
gatctttgtactaggaggct

SEQ ID NO: 3523 - RNA, 20 nt, synthetic construct
  misc_feature 1..20: note = HBV-targeting guide sequence portion
  source 1..20: mol_type = other RNA
gatgaagaggaagatgataa

SEQ ID NO: 3524 - RNA, 20 nt, synthetic construct
  misc_feature 1..20: note = HBV-targeting guide sequence portion
  source 1..20: mol_type = other RNA
gatgagaaggcacagacggg

SEQ ID NO: 3525 - RNA, 20 nt, synthetic construct
  misc_feature 1..20: note = HBV-targeting guide sequence portion
  source 1..20: mol_type = other RNA
gatgaggcatagcagcagga

SEQ ID NO: 3526 - RNA, 20 nt, synthetic construct
  misc_feature 1..20: note = HBV-targeting guide sequence portion
  source 1..20: mol_type = other RNA
gatgagtgtttctcagaggt

SEQ ID NO: 3527 - RNA, 20 nt, synthetic construct
  misc_feature 1..20: note = HBV-targeting guide sequence portion
  source 1..20: mol_type = other RNA
gatgataaaacgccgcagac

SEQ ID NO: 3528 - RNA, 20 nt, synthetic construct
  misc_feature 1..20: note = HBV-targeting guide sequence portion
  source 1..20: mol_type = other RNA
gatgatcctggaattagagg

SEQ ID NO: 3529 - RNA, 20 nt, synthetic construct
  misc_feature 1..20: note = HBV-targeting guide sequence portion
  source 1..20: mol_type = other RNA
gatgatgggatgggaataca

SEQ ID NO: 3530 - RNA, 20 nt, synthetic construct
  misc_feature 1..20: note = HBV-targeting guide sequence portion
  source 1..20: mol_type = other RNA
gatgatgtggtattgggggc

SEQ ID NO: 3531 - RNA, 20 nt, synthetic construct
  misc_feature 1..20: note = HBV-targeting guide sequence portion
  source 1..20: mol_type = other RNA
gatgattaggcagaggtgaa

SEQ ID NO: 3532 - RNA, 20 nt, synthetic construct
  misc_feature 1..20: note = HBV-targeting guide sequence portion
  source 1..20: mol_type = other RNA
gatgcaacccccactggttg

SEQ ID NO: 3533 - RNA, 20 nt, synthetic construct
  misc_feature 1..20: note = HBV-targeting guide sequence portion
  source 1..20: mol_type = other RNA
gatgccttggagtctcctga

SEQ ID NO: 3534 - RNA, 20 nt, synthetic construct
  misc_feature 1..20: note = HBV-targeting guide sequence portion
  source 1..20: mol_type = other RNA
gatgctgtacagacttggcc

SEQ ID NO: 3535 - RNA, 20 nt, synthetic construct
  misc_feature 1..20: note = HBV-targeting guide sequence portion
  source 1..20: mol_type = other RNA
gatgcttgatcttctaaatt

SEQ ID NO: 3536 - RNA, 20 nt, synthetic construct
  misc_feature 1..20: note = HBV-targeting guide sequence portion
  source 1..20: mol_type = other RNA
gatggaaactgcacctgtat

SEQ ID NO: 3537 - RNA, 20 nt, synthetic construct
  misc_feature 1..20: note = HBV-targeting guide sequence portion
  source 1..20: mol_type = other RNA
gatggcctatgaccaagccc

SEQ ID NO: 3538 - RNA, 20 nt, synthetic construct
  misc_feature 1..20: note = HBV-targeting guide sequence portion
  source 1..20: mol_type = other RNA
gatgggaatacaggtgcagt

SEQ ID NO: 3539 - RNA, 20 nt, synthetic construct
  misc_feature 1..20: note = HBV-targeting guide sequence portion
  source 1..20: mol_type = other RNA
gatgggatgggaatacaggt

SEQ ID NO: 3540 - RNA, 20 nt, synthetic construct
  misc_feature 1..20: note = HBV-targeting guide sequence portion
  source 1..20: mol_type = other RNA
gatggggttattctcttaat

SEQ ID NO: 3541 - RNA, 20 nt, synthetic construct
  misc_feature 1..20: note = HBV-targeting guide sequence portion
  source 1..20: mol_type = other RNA
gatgggtcgtccgcgggatt

SEQ ID NO: 3542 - RNA, 20 nt, synthetic construct
  misc_feature 1..20: note = HBV-targeting guide sequence portion
  source 1..20: mol_type = other RNA
gatgtatattaggaaaagag

SEQ ID NO: 3543 - RNA, 20 nt, synthetic construct
  misc_feature 1..20: note = HBV-targeting guide sequence portion
  source 1..20: mol_type = other RNA
gatgtatatttgcgggagag

SEQ ID NO: 3544 - RNA, 20 nt, synthetic construct
  misc_feature 1..20: note = HBV-targeting guide sequence portion
  source 1..20: mol_type = other RNA
gatgtgatgttctccatgtt

SEQ ID NO: 3545 - RNA, 20 nt, synthetic construct
  misc_feature 1..20: note = HBV-targeting guide sequence portion
  source 1..20: mol_type = other RNA
gatgtgattttgtggcaatg

SEQ ID NO: 3546 - RNA, 20 nt, synthetic construct
  misc_feature 1..20: note = HBV-targeting guide sequence portion
  source 1..20: mol_type = other RNA
gatgtggtattgggggccaa

SEQ ID NO: 3547 - RNA, 20 nt, synthetic construct
  misc_feature 1..20: note = HBV-targeting guide sequence portion
  source 1..20: mol_type = other RNA
gatgtgtctgcggcgtttta

SEQ ID NO: 3548 - RNA, 20 nt, synthetic construct
  misc_feature 1..20: note = HBV-targeting guide sequence portion
  source 1..20: mol_type = other RNA
gatgttctccatgttcagcg

SEQ ID NO: 3549 - RNA, 20 nt, synthetic construct
  misc_feature 1..20: note = HBV-targeting guide sequence portion
  source 1..20: mol_type = other RNA
gatgttctggataataaggt

SEQ ID NO: 3550 - RNA, 20 nt, synthetic construct
  misc_feature 1..20: note = HBV-targeting guide sequence portion
  source 1..20: mol_type = other RNA
gattaactagatgttctgga

SEQ ID NO: 3551 - RNA, 20 nt, synthetic construct
  misc_feature 1..20: note = HBV-targeting guide sequence portion
  source 1..20: mol_type = other RNA
gattaatgatctttgtacta

SEQ ID NO: 3552 - RNA, 20 nt, synthetic construct
  misc_feature 1..20: note = HBV-targeting guide sequence portion
  source 1..20: mol_type = other RNA
gattagattaatgatctttg

SEQ ID NO: 3553 - RNA, 20 nt, synthetic construct
  misc_feature 1..20: note = HBV-targeting guide sequence portion
  source 1..20: mol_type = other RNA
gattaggcagaggtgaaaaa

SEQ ID NO: 3554 - RNA, 20 nt, synthetic construct
  misc_feature 1..20: note = HBV-targeting guide sequence portion
  source 1..20: mol_type = other RNA
gattatgcctgctaggtttt

SEQ ID NO: 3555 - RNA, 20 nt, synthetic construct
  misc_feature 1..20: note = HBV-targeting guide sequence portion
  source 1..20: mol_type = other RNA
gattcagcgccgacgggacg

SEQ ID NO: 3556 - RNA, 20 nt, synthetic construct
  misc_feature 1..20: note = HBV-targeting guide sequence portion
  source 1..20: mol_type = other RNA
gattcctaggacccctgctc

SEQ ID NO: 3557 - RNA, 20 nt, synthetic construct
  misc_feature 1..20: note = HBV-targeting guide sequence portion
  source 1..20: mol_type = other RNA
gattcgcactcctccagctt

SEQ ID NO: 3558 - RNA, 20 nt, synthetic construct
  misc_feature 1..20: note = HBV-targeting guide sequence portion
  source 1..20: mol_type = other RNA
gattctgccccatgctgtag

SEQ ID NO: 3559 - RNA, 20 nt, synthetic construct
  misc_feature 1..20: note = HBV-targeting guide sequence portion
  source 1..20: mol_type = other RNA
gattcttgtcaacaaggaaa

SEQ ID NO: 3560 - RNA, 20 nt, synthetic construct
  misc_feature 1..20: note = HBV-targeting guide sequence portion
  source 1..20: mol_type = other RNA
gattctttcccgaccaccag

SEQ ID NO: 3561 - RNA, 20 nt, synthetic construct
  misc_feature 1..20: note = HBV-targeting guide sequence portion
  source 1..20: mol_type = other RNA
gattgaagtcccaatctgga

SEQ ID NO: 3562 - RNA, 20 nt, synthetic construct
  misc_feature 1..20: note = HBV-targeting guide sequence portion
  source 1..20: mol_type = other RNA
gattgaatacatgcatacaa

SEQ ID NO: 3563 - RNA, 20 nt, synthetic construct
  misc_feature 1..20: note = HBV-targeting guide sequence portion
  source 1..20: mol_type = other RNA
gattgacgatatgtgagagg

SEQ ID NO: 3564 - RNA, 20 nt, synthetic construct
  misc_feature 1..20: note = HBV-targeting guide sequence portion
  source 1..20: mol_type = other RNA
gattgagatcttcgtctgcg

SEQ ID NO: 3565 - RNA, 20 nt, synthetic construct
  misc_feature 1..20: note = HBV-targeting guide sequence portion
  source 1..20: mol_type = other RNA
gattgagatcttctgcgacg

SEQ ID NO: 3566 - RNA, 20 nt, synthetic construct
  misc_feature 1..20: note = HBV-targeting guide sequence portion
  source 1..20: mol_type = other RNA
gattgctggtggaaagattc

SEQ ID NO: 3567 - RNA, 20 nt, synthetic construct
  misc_feature 1..20: note = HBV-targeting guide sequence portion
  source 1..20: mol_type = other RNA
gattggaaagtgtgtcaacg

SEQ ID NO: 3568 - RNA, 20 nt, synthetic construct
  misc_feature 1..20: note = HBV-targeting guide sequence portion
  source 1..20: mol_type = other RNA
gattggaggttggggactgc

SEQ ID NO: 3569 - RNA, 20 nt, synthetic construct
  misc_feature 1..20: note = HBV-targeting guide sequence portion
  source 1..20: mol_type = other RNA
gattgggacttcaatcccaa

SEQ ID NO: 3570 - RNA, 20 nt, synthetic construct
  misc_feature 1..20: note = HBV-targeting guide sequence portion
  source 1..20: mol_type = other RNA
gattggggaccctgcgctga

SEQ ID NO: 3571 - RNA, 20 nt, synthetic construct
  misc_feature 1..20: note = HBV-targeting guide sequence portion
  source 1..20: mol_type = other RNA
gattggtagaggcaggaggc

SEQ ID NO: 3572 - RNA, 20 nt, synthetic construct
  misc_feature 1..20: note = HBV-targeting guide sequence portion
  source 1..20: mol_type = other RNA
gattgttggagtttgctctg

SEQ ID NO: 3573 - RNA, 20 nt, synthetic construct
  misc_feature 1..20: note = HBV-targeting guide sequence portion
  source 1..20: mol_type = other RNA
gattgttggggatcattgcc

SEQ ID NO: 3574 - RNA, 20 nt, synthetic construct
  misc_feature 1..20: note = HBV-targeting guide sequence portion
  source 1..20: mol_type = other RNA
gatttgctggcaaggtttgc

SEQ ID NO: 3575 - RNA, 20 nt, synthetic construct
  misc_feature 1..20: note = HBV-targeting guide sequence portion
  source 1..20: mol_type = other RNA
gattttgtggcaatgatccc

SEQ ID NO: 3576 - RNA, 20 nt, synthetic construct
  misc_feature 1..20: note = HBV-targeting guide sequence portion
  source 1..20: mol_type = other RNA
gattttgtgtatgatgtgat

SEQ ID NO: 3577 - RNA, 20 nt, synthetic construct
  misc_feature 1..20: note = HBV-targeting guide sequence portion
  source 1..20: mol_type = other RNA
gcaaaaacgagagtaactcc

SEQ ID NO: 3578 - RNA, 20 nt, synthetic construct
  misc_feature 1..20: note = HBV-targeting guide sequence portion
  source 1..20: mol_type = other RNA
gcaaaacaagcggctaggag

SEQ ID NO: 3579 - RNA, 20 nt, synthetic construct
  misc_feature 1..20: note = HBV-targeting guide sequence portion
  source 1..20: mol_type = other RNA
gcaaaacccagaagacccac

SEQ ID NO: 3580 - RNA, 20 nt, synthetic construct
  misc_feature 1..20: note = HBV-targeting guide sequence portion
  source 1..20: mol_type = other RNA
gcaaacacttggcacagacc

SEQ ID NO: 3581 - RNA, 20 nt, synthetic construct
  misc_feature 1..20: note = HBV-targeting guide sequence portion
  source 1..20: mol_type = other RNA
gcaaacattctcgggactga

SEQ ID NO: 3582 - RNA, 20 nt, synthetic construct
  misc_feature 1..20: note = HBV-targeting guide sequence portion
  source 1..20: mol_type = other RNA
gcaaaccttgccagcaaatc

SEQ ID NO: 3583 - RNA, 20 nt, synthetic construct
  misc_feature 1..20: note = HBV-targeting guide sequence portion
  source 1..20: mol_type = other RNA
gcaaactccaacaatccaga

SEQ ID NO: 3584 - RNA, 20 nt, synthetic construct
  misc_feature 1..20: note = HBV-targeting guide sequence portion
  source 1..20: mol_type = other RNA
gcaaagaattgcttgcctga

SEQ ID NO: 3585 - RNA, 20 nt, synthetic construct
  misc_feature 1..20: note = HBV-targeting guide sequence portion
  source 1..20: mol_type = other RNA
gcaaatatacatcgttccca

SEQ ID NO: 3586 - RNA, 20 nt, synthetic construct
  misc_feature 1..20: note = HBV-targeting guide sequence portion
  source 1..20: mol_type = other RNA
gcaaatccgcctcctgcctc

SEQ ID NO: 3587 - RNA, 20 nt, synthetic construct
  misc_feature 1..20: note = HBV-targeting guide sequence portion
  source 1..20: mol_type = other RNA
gcaacaggagggatacatag

SEQ ID NO: 3588 - RNA, 20 nt, synthetic construct
  misc_feature 1..20: note = HBV-targeting guide sequence portion
  source 1..20: mol_type = other RNA
gcaacccccactggttgggg

SEQ ID NO: 3589 - RNA, 20 nt, synthetic construct
  misc_feature 1..20: note = HBV-targeting guide sequence portion
  source 1..20: mol_type = other RNA
gcaacggccaggtctgtgcc

SEQ ID NO: 3590 - RNA, 20 nt, synthetic construct
  misc_feature 1..20: note = HBV-targeting guide sequence portion
  source 1..20: mol_type = other RNA
gcaacggggtaaaggttcag

SEQ ID NO: 3591 - RNA, 20 nt, synthetic construct
  misc_feature 1..20: note = HBV-targeting guide sequence portion
  source 1..20: mol_type = other RNA
gcaactttttcacctctgcc

SEQ ID NO: 3592 - RNA, 20 nt, synthetic construct
  misc_feature 1..20: note = HBV-targeting guide sequence portion
  source 1..20: mol_type = other RNA
gcaagaattggtgggcgttc

SEQ ID NO: 3593 - RNA, 20 nt, synthetic construct
  misc_feature 1..20: note = HBV-targeting guide sequence portion
  source 1..20: mol_type = other RNA
gcaagatcccagagtgagag

SEQ ID NO: 3594 - RNA, 20 nt, synthetic construct
  misc_feature 1..20: note = HBV-targeting guide sequence portion
  source 1..20: mol_type = other RNA
gcaagcaattctttgctggg

SEQ ID NO: 3595 - RNA, 20 nt, synthetic construct
  misc_feature 1..20: note = HBV-targeting guide sequence portion
  source 1..20: mol_type = other RNA
gcaaggtttgcattatgccc

SEQ ID NO: 3596 - RNA, 20 nt, synthetic construct
  misc_feature 1..20: note = HBV-targeting guide sequence portion
  source 1..20: mol_type = other RNA
gcaagtatttggtgaattta

SEQ ID NO: 3597 - RNA, 20 nt, synthetic construct
  misc_feature 1..20: note = HBV-targeting guide sequence portion
  source 1..20: mol_type = other RNA
gcaatcctctgggattcttt

SEQ ID NO: 3598 - RNA, 20 nt, synthetic construct
  misc_feature 1..20: note = HBV-targeting guide sequence portion
  source 1..20: mol_type = other RNA
gcaatgatccccaacaatca

SEQ ID NO: 3599 - RNA, 20 nt, synthetic construct
  misc_feature 1..20: note = HBV-targeting guide sequence portion
  source 1..20: mol_type = other RNA
gcaatgtcaacgaccgacct

SEQ ID NO: 3600 - RNA, 20 nt, synthetic construct
  misc_feature 1..20: note = HBV-targeting guide sequence portion
  source 1..20: mol_type = other RNA
gcaattctttgctggggaga

SEQ ID NO: 3601 - RNA, 20 nt, synthetic construct
  misc_feature 1..20: note = HBV-targeting guide sequence portion
  source 1..20: mol_type = other RNA
gcacacggtccggcagatga

SEQ ID NO: 3602 - RNA, 20 nt, synthetic construct
  misc_feature 1..20: note = HBV-targeting guide sequence portion
  source 1..20: mol_type = other RNA
gcacagacctggccgttgcc

SEQ ID NO: 3603 - RNA, 20 nt, synthetic construct
  misc_feature 1..20: note = HBV-targeting guide sequence portion
  source 1..20: mol_type = other RNA
gcacagacggggagtccgcg

SEQ ID NO: 3604 - RNA, 20 nt, synthetic construct
  misc_feature 1..20: note = HBV-targeting guide sequence portion
  source 1..20: mol_type = other RNA
gcacagcctagcagccatgg

SEQ ID NO: 3605 - RNA, 20 nt, synthetic construct
  misc_feature 1..20: note = HBV-targeting guide sequence portion
  source 1..20: mol_type = other RNA
gcacagcttggaggcttgaa

SEQ ID NO: 3606 - RNA, 20 nt, synthetic construct
  misc_feature 1..20: note = HBV-targeting guide sequence portion
  source 1..20: mol_type = other RNA
gcaccagcaccatgcaactt

SEQ ID NO: 3607 - RNA, 20 nt, synthetic construct
  misc_feature 1..20: note = HBV-targeting guide sequence portion
  source 1..20: mol_type = other RNA
gcaccatgcaactttttcac

SEQ ID NO: 3608 - RNA, 20 nt, synthetic construct
  misc_feature 1..20: note = HBV-targeting guide sequence portion
  source 1..20: mol_type = other RNA
gcacctctctttacgcggac

SEQ ID NO: 3609 - RNA, 20 nt, synthetic construct
  misc_feature 1..20: note = HBV-targeting guide sequence portion
  source 1..20: mol_type = other RNA
gcacctgtattcccatccca

SEQ ID NO: 3610 - RNA, 20 nt, synthetic construct
  misc_feature 1..20: note = HBV-targeting guide sequence portion
  source 1..20: mol_type = other RNA
gcacgactcctgctcaagga

SEQ ID NO: 3611 - RNA, 20 nt, synthetic construct
  misc_feature 1..20: note = HBV-targeting guide sequence portion
  source 1..20: mol_type = other RNA
gcacggaggccttttggggt

SEQ ID NO: 3612 - RNA, 20 nt, synthetic construct
  misc_feature 1..20: note = HBV-targeting guide sequence portion
  source 1..20: mol_type = other RNA
gcacgggaccctgcagaacc

SEQ ID NO: 3613 - RNA, 20 nt, synthetic construct
  misc_feature 1..20: note = HBV-targeting guide sequence portion
  source 1..20: mol_type = other RNA
gcacgtcgcatggagaccac

SEQ ID NO: 3614 - RNA, 20 nt, synthetic construct
  misc_feature 1..20: note = HBV-targeting guide sequence portion
  source 1..20: mol_type = other RNA
gcactagtaaactgagccaa

SEQ ID NO: 3615 - RNA, 20 nt, synthetic construct
  misc_feature 1..20: note = HBV-targeting guide sequence portion
  source 1..20: mol_type = other RNA
gcactcaggcaagcaattct

SEQ ID NO: 3616 - RNA, 20 nt, synthetic construct
  misc_feature 1..20: note = HBV-targeting guide sequence portion
  source 1..20: mol_type = other RNA
gcactcctccagcttataga

SEQ ID NO: 3617 - RNA, 20 nt, synthetic construct
  misc_feature 1..20: note = HBV-targeting guide sequence portion
  source 1..20: mol_type = other RNA
gcacttcgcttcacctctgc

SEQ ID NO: 3618 - RNA, 20 nt, synthetic construct
  misc_feature 1..20: note = HBV-targeting guide sequence portion
  source 1..20: mol_type = other RNA
gcagaacctgcacgactcct

SEQ ID NO: 3619 - RNA, 20 nt, synthetic construct
  misc_feature 1..20: note = HBV-targeting guide sequence portion
  source 1..20: mol_type = other RNA
gcagaagatctcaatctcgg

SEQ ID NO: 3620 - RNA, 20 nt, synthetic construct
  misc_feature 1..20: note = HBV-targeting guide sequence portion
  source 1..20: mol_type = other RNA
gcagaatctttccaccagca

SEQ ID NO: 3621 - RNA, 20 nt, synthetic construct
  misc_feature 1..20: note = HBV-targeting guide sequence portion
  source 1..20: mol_type = other RNA
gcagacacatccagcgataa

SEQ ID NO: 3622 - RNA, 20 nt, synthetic construct
  misc_feature 1..20: note = HBV-targeting guide sequence portion
  source 1..20: mol_type = other RNA
gcagaccaatttatgcctac

SEQ ID NO: 3623 - RNA, 20 nt, synthetic construct
  misc_feature 1..20: note = HBV-targeting guide sequence portion
  source 1..20: mol_type = other RNA
gcagacgaagatctcaatcg

SEQ ID NO: 3624 - RNA, 20 nt, synthetic construct
  misc_feature 1..20: note = HBV-targeting guide sequence portion
  source 1..20: mol_type = other RNA
gcagagaagaggacgacagg

SEQ ID NO: 3625 - RNA, 20 nt, synthetic construct
  misc_feature 1..20: note = HBV-targeting guide sequence portion
  source 1..20: mol_type = other RNA
gcagagagtccaagagtcct

SEQ ID NO: 3626 - RNA, 20 nt, synthetic construct
  misc_feature 1..20: note = HBV-targeting guide sequence portion
  source 1..20: mol_type = other RNA
gcagaggagccggaaaggtt

SEQ ID NO: 3627 - RNA, 20 nt, synthetic construct
  misc_feature 1..20: note = HBV-targeting guide sequence portion
  source 1..20: mol_type = other RNA
gcagaggtgaaaaagttgca

SEQ ID NO: 3628 - RNA, 20 nt, synthetic construct
  misc_feature 1..20: note = HBV-targeting guide sequence portion
  source 1..20: mol_type = other RNA
gcagaggtgaagcgaagtgc

SEQ ID NO: 3629 - RNA, 20 nt, synthetic construct
  misc_feature 1..20: note = HBV-targeting guide sequence portion
  source 1..20: mol_type = other RNA
gcagagtctagactcgtggt

SEQ ID NO: 3630 - RNA, 20 nt, synthetic construct
  misc_feature 1..20: note = HBV-targeting guide sequence portion
  source 1..20: mol_type = other RNA
gcagagtttggtggaaggtt

SEQ ID NO: 3631 - RNA, 20 nt, synthetic construct
  misc_feature 1..20: note = HBV-targeting guide sequence portion
  source 1..20: mol_type = other RNA
gcagatgagaaggcacagac

SEQ ID NO: 3632 - RNA, 20 nt, synthetic construct
  misc_feature 1..20: note = HBV-targeting guide sequence portion
  source 1..20: mol_type = other RNA
gcagcaaaacccagaagacc

SEQ ID NO: 3633 - RNA, 20 nt, synthetic construct
  misc_feature 1..20: note = HBV-targeting guide sequence portion
  source 1..20: mol_type = other RNA
gcagcacagcctagcagcca

SEQ ID NO: 3634 - RNA, 20 nt, synthetic construct
  misc_feature 1..20: note = HBV-targeting guide sequence portion
  source 1..20: mol_type = other RNA
gcagcaggatgaagaggaag

SEQ ID NO: 3635 - RNA, 20 nt, synthetic construct
  misc_feature 1..20: note = HBV-targeting guide sequence portion
  source 1..20: mol_type = other RNA
gcagccatgggaacgatgta

SEQ ID NO: 3636 - RNA, 20 nt, synthetic construct
  misc_feature 1..20: note = HBV-targeting guide sequence portion
  source 1..20: mol_type = other RNA
gcagccggtctggagcaaac

SEQ ID NO: 3637 - RNA, 20 nt, synthetic construct
  misc_feature 1..20: note = HBV-targeting guide sequence portion
  source 1..20: mol_type = other RNA
gcagcctaccccgctgtctc

SEQ ID NO: 3638 - RNA, 20 nt, synthetic construct
  misc_feature 1..20: note = HBV-targeting guide sequence portion
  source 1..20: mol_type = other RNA
gcagctctgtatcgggatgc

SEQ ID NO: 3639 - RNA, 20 nt, synthetic construct
  misc_feature 1..20: note = HBV-targeting guide sequence portion
  source 1..20: mol_type = other RNA
gcaggaggcggatttgctgg

SEQ ID NO: 3640 - RNA, 20 nt, synthetic construct
  misc_feature 1..20: note = HBV-targeting guide sequence portion
  source 1..20: mol_type = other RNA
gcaggagtcgtgcaggttct

SEQ ID NO: 3641 - RNA, 20 nt, synthetic construct
  misc_feature 1..20: note = HBV-targeting guide sequence portion
  source 1..20: mol_type = other RNA
gcaggataaccacattgtgt

SEQ ID NO: 3642 - RNA, 20 nt, synthetic construct
  misc_feature 1..20: note = HBV-targeting guide sequence portion
  source 1..20: mol_type = other RNA
gcaggatccagttggcagca

SEQ ID NO: 3643 - RNA, 20 nt, synthetic construct
  misc_feature 1..20: note = HBV-targeting guide sequence portion
  source 1..20: mol_type = other RNA
gcaggatgaagaggaagatg

SEQ ID NO: 3644 - RNA, 20 nt, synthetic construct
  misc_feature 1..20: note = HBV-targeting guide sequence portion
  source 1..20: mol_type = other RNA
gcaggcagagaagaggacga

SEQ ID NO: 3645 - RNA, 20 nt, synthetic construct
  misc_feature 1..20: note = HBV-targeting guide sequence portion
  source 1..20: mol_type = other RNA
gcaggcataatcaatttcaa

SEQ ID NO: 3646 - RNA, 20 nt, synthetic construct
  misc_feature 1..20: note = HBV-targeting guide sequence portion
  source 1..20: mol_type = other RNA
gcaggctttcactttttcgc

SEQ ID NO: 3647 - RNA, 20 nt, synthetic construct
  misc_feature 1..20: note = HBV-targeting guide sequence portion
  source 1..20: mol_type = other RNA
gcagggagatacaggcctct

SEQ ID NO: 3648 - RNA, 20 nt, synthetic construct
  misc_feature 1..20: note = HBV-targeting guide sequence portion
  source 1..20: mol_type = other RNA
gcaggggtcctaggaatcct

SEQ ID NO: 3649 - RNA, 20 nt, synthetic construct
  misc_feature 1..20: note = HBV-targeting guide sequence portion
  source 1..20: mol_type = other RNA
gcagggtccccaatcctcga

SEQ ID NO: 3650 - RNA, 20 nt, synthetic construct
  misc_feature 1..20: note = HBV-targeting guide sequence portion
  source 1..20: mol_type = other RNA
gcagggtcccgtgctggtgg

SEQ ID NO: 3651 - RNA, 20 nt, synthetic construct
  misc_feature 1..20: note = HBV-targeting guide sequence portion
  source 1..20: mol_type = other RNA
gcaggtcccctagaagaaga

SEQ ID NO: 3652 - RNA, 20 nt, synthetic construct
  misc_feature 1..20: note = HBV-targeting guide sequence portion
  source 1..20: mol_type = other RNA
gcaggttctgcagggtcccg

SEQ ID NO: 3653 - RNA, 20 nt, synthetic construct
  misc_feature 1..20: note = HBV-targeting guide sequence portion
  source 1..20: mol_type = other RNA
gcagtagtcggaacagggtt

SEQ ID NO: 3654 - RNA, 20 nt, synthetic construct
  misc_feature 1..20: note = HBV-targeting guide sequence portion
  source 1..20: mol_type = other RNA
gcagtatggatcggcagagg

SEQ ID NO: 3655 - RNA, 20 nt, synthetic construct
  misc_feature 1..20: note = HBV-targeting guide sequence portion
  source 1..20: mol_type = other RNA
gcagtatggtgaggtgaaca

SEQ ID NO: 3656 - RNA, 20 nt, synthetic construct
  misc_feature 1..20: note = HBV-targeting guide sequence portion
  source 1..20: mol_type = other RNA
gcagtccccaacctccaatc

SEQ ID NO: 3657 - RNA, 20 nt, synthetic construct
  misc_feature 1..20: note = HBV-targeting guide sequence portion
  source 1..20: mol_type = other RNA
gcagtttccatccgaaggtt

SEQ ID NO: 3658 - RNA, 20 nt, synthetic construct
  misc_feature 1..20: note = HBV-targeting guide sequence portion
  source 1..20: mol_type = other RNA
gcataaattggtctgcgcac

SEQ ID NO: 3659 - RNA, 20 nt, synthetic construct
  misc_feature 1..20: note = HBV-targeting guide sequence portion
  source 1..20: mol_type = other RNA
gcataatcaatttcaaccgt

SEQ ID NO: 3660 - RNA, 20 nt, synthetic construct
  misc_feature 1..20: note = HBV-targeting guide sequence portion
  source 1..20: mol_type = other RNA
gcataatgcaaaccttgcca

SEQ ID NO: 3661 - RNA, 20 nt, synthetic construct
  misc_feature 1..20: note = HBV-targeting guide sequence portion
  source 1..20: mol_type = other RNA
gcatacaagggcattaaagc

SEQ ID NO: 3662 - RNA, 20 nt, synthetic construct
  misc_feature 1..20: note = HBV-targeting guide sequence portion
  source 1..20: mol_type = other RNA
gcatacttcaaagactgttt

SEQ ID NO: 3663 - RNA, 20 nt, synthetic construct
  misc_feature 1..20: note = HBV-targeting guide sequence portion
  source 1..20: mol_type = other RNA
gcatagcagcaggatgaaga

SEQ ID NO: 3664 - RNA, 20 nt, synthetic construct
  misc_feature 1..20: note = HBV-targeting guide sequence portion
  source 1..20: mol_type = other RNA
gcatcagcaaacacttggca

SEQ ID NO: 3665 - RNA, 20 nt, synthetic construct
  misc_feature 1..20: note = HBV-targeting guide sequence portion
  source 1..20: mol_type = other RNA
gcatcccgatacagagctgc

SEQ ID NO: 3666 - RNA, 20 nt, synthetic construct
  misc_feature 1..20: note = HBV-targeting guide sequence portion
  source 1..20: mol_type = other RNA
gcatctagggacctagtagt

SEQ ID NO: 3667 - RNA, 20 nt, synthetic construct
  misc_feature 1..20: note = HBV-targeting guide sequence portion
  source 1..20: mol_type = other RNA
gcatcttgagtccctttata

SEQ ID NO: 3668 - RNA, 20 nt, synthetic construct
  misc_feature 1..20: note = HBV-targeting guide sequence portion
  source 1..20: mol_type = other RNA
gcatgcgctgatggcctatg

SEQ ID NO: 3669 - RNA, 20 nt, synthetic construct
  misc_feature 1..20: note = HBV-targeting guide sequence portion
  source 1..20: mol_type = other RNA
gcatgcgtggaacctttccg

SEQ ID NO: 3670 - RNA, 20 nt, synthetic construct
  misc_feature 1..20: note = HBV-targeting guide sequence portion
  source 1..20: mol_type = other RNA
gcatggacattgacccatat

SEQ ID NO: 3671 - RNA, 20 nt, synthetic construct
  misc_feature 1..20: note = HBV-targeting guide sequence portion
  source 1..20: mol_type = other RNA
gcatggagaccaccgtgaac

SEQ ID NO: 3672 - RNA, 20 nt, synthetic construct
  misc_feature 1..20: note = HBV-targeting guide sequence portion
  source 1..20: mol_type = other RNA
gcatggcctgaggatgagtg

SEQ ID NO: 3673 - RNA, 20 nt, synthetic construct
  misc_feature 1..20: note = HBV-targeting guide sequence portion
  source 1..20: mol_type = other RNA
gcatggggcagaatctttcc

SEQ ID NO: 3674 - RNA, 20 nt, synthetic construct
  misc_feature 1..20: note = HBV-targeting guide sequence portion
  source 1..20: mol_type = other RNA
gcatggtgctggtgcgcaga

SEQ ID NO: 3675 - RNA, 20 nt, synthetic construct
  misc_feature 1..20: note = HBV-targeting guide sequence portion
  source 1..20: mol_type = other RNA
gcatgtattcaatctaagca

SEQ ID NO: 3676 - RNA, 20 nt, synthetic construct
  misc_feature 1..20: note = HBV-targeting guide sequence portion
  source 1..20: mol_type = other RNA
gcattaaagcaggataacca

SEQ ID NO: 3677 - RNA, 20 nt, synthetic construct
  misc_feature 1..20: note = HBV-targeting guide sequence portion
  source 1..20: mol_type = other RNA
gcattatgccctgagcctga

SEQ ID NO: 3678 - RNA, 20 nt, synthetic construct
  misc_feature 1..20: note = HBV-targeting guide sequence portion
  source 1..20: mol_type = other RNA
gcattcgggctagggttcac

SEQ ID NO: 3679 - RNA, 20 nt, synthetic construct
  misc_feature 1..20: note = HBV-targeting guide sequence portion
  source 1..20: mol_type = other RNA
gcattgttcacctcaccata

SEQ ID NO: 3680 - RNA, 20 nt, synthetic construct
  misc_feature 1..20: note = HBV-targeting guide sequence portion
  source 1..20: mol_type = other RNA
gcatttggtggtctataagc

SEQ ID NO: 3681 - RNA, 20 nt, synthetic construct
  misc_feature 1..20: note = HBV-targeting guide sequence portion
  source 1..20: mol_type = other RNA
gccaaaattcgcagtcccca

SEQ ID NO: 3682 - RNA, 20 nt, synthetic construct
  misc_feature 1..20: note = HBV-targeting guide sequence portion
  source 1..20: mol_type = other RNA
gccaaacagtgggggaaagc

SEQ ID NO: 3683 - RNA, 20 nt, synthetic construct
  misc_feature 1..20: note = HBV-targeting guide sequence portion
  source 1..20: mol_type = other RNA
gccaacaaggtaggagctgg

SEQ ID NO: 3684 - RNA, 20 nt, synthetic construct
  misc_feature 1..20: note = HBV-targeting guide sequence portion
  source 1..20: mol_type = other RNA
gccaactggatcctgcgcgg

SEQ ID NO: 3685 - RNA, 20 nt, synthetic construct
  misc_feature 1..20: note = HBV-targeting guide sequence portion
  source 1..20: mol_type = other RNA
gccaacttacaaggcctttc

SEQ ID NO: 3686 - RNA, 20 nt, synthetic construct
  misc_feature 1..20: note = HBV-targeting guide sequence portion
  source 1..20: mol_type = other RNA
gccaagacacacggtagttc

SEQ ID NO: 3687 - RNA, 20 nt, synthetic construct
  misc_feature 1..20: note = HBV-targeting guide sequence portion
  source 1..20: mol_type = other RNA
gccaagagaaacgggctgag

SEQ ID NO: 3688 - RNA, 20 nt, synthetic construct
  misc_feature 1..20: note = HBV-targeting guide sequence portion
  source 1..20: mol_type = other RNA
gccaagtctgtacagcatct

SEQ ID NO: 3689 - RNA, 20 nt, synthetic construct
  misc_feature 1..20: note = HBV-targeting guide sequence portion
  source 1..20: mol_type = other RNA
gccaagtgtttgctgatgca

SEQ ID NO: 3690 - RNA, 20 nt, synthetic construct
  misc_feature 1..20: note = HBV-targeting guide sequence portion
  source 1..20: mol_type = other RNA
gccacaaaatcacatcatac

SEQ ID NO: 3691 - RNA, 20 nt, synthetic construct
  misc_feature 1..20: note = HBV-targeting guide sequence portion
  source 1..20: mol_type = other RNA
gccaccagcagggagataca

SEQ ID NO: 3692 - RNA, 20 nt, synthetic construct
  misc_feature 1..20: note = HBV-targeting guide sequence portion
  source 1..20: mol_type = other RNA
gccacccaaggcacagcttg

SEQ ID NO: 3693 - RNA, 20 nt, synthetic construct
  misc_feature 1..20: note = HBV-targeting guide sequence portion
  source 1..20: mol_type = other RNA
gccagacgccaacaaggtag

SEQ ID NO: 3694 - RNA, 20 nt, synthetic construct
  misc_feature 1..20: note = HBV-targeting guide sequence portion
  source 1..20: mol_type = other RNA
gccagcaaatccgcctcctg

SEQ ID NO: 3695 - RNA, 20 nt, synthetic construct
  misc_feature 1..20: note = HBV-targeting guide sequence portion
  source 1..20: mol_type = other RNA
gccaggcaacggccaggtct

SEQ ID NO: 3696 - RNA, 20 nt, synthetic construct
  misc_feature 1..20: note = HBV-targeting guide sequence portion
  source 1..20: mol_type = other RNA
gccagggatccttgttggga

SEQ ID NO: 3697 - RNA, 20 nt, synthetic construct
  misc_feature 1..20: note = HBV-targeting guide sequence portion
  source 1..20: mol_type = other RNA
gccaggtctgtgccaagtgt

SEQ ID NO: 3698 - RNA, 20 nt, synthetic construct
  misc_feature 1..20: note = HBV-targeting guide sequence portion
  source 1..20: mol_type = other RNA
gccagtcaggacggcagcct

SEQ ID NO: 3699 - RNA, 20 nt, synthetic construct
  misc_feature 1..20: note = HBV-targeting guide sequence portion
  source 1..20: mol_type = other RNA
gccatcagcgcatgcgtgga

SEQ ID NO: 3700 - RNA, 20 nt, synthetic construct
  misc_feature 1..20: note = HBV-targeting guide sequence portion
  source 1..20: mol_type = other RNA
gccatgggaacgatgtatat

SEQ ID NO: 3701 - RNA, 20 nt, synthetic construct
  misc_feature 1..20: note = HBV-targeting guide sequence portion
  source 1..20: mol_type = other RNA
gccatttgttcagtggttcg

SEQ ID NO: 3702 - RNA, 20 nt, synthetic construct
  misc_feature 1..20: note = HBV-targeting guide sequence portion
  source 1..20: mol_type = other RNA
gcccaaggtcttacataaga

SEQ ID NO: 3703 - RNA, 20 nt, synthetic construct
  misc_feature 1..20: note = HBV-targeting guide sequence portion
  source 1..20: mol_type = other RNA
gcccaccaattcttgcccaa

SEQ ID NO: 3704 - RNA, 20 nt, synthetic construct
  misc_feature 1..20: note = HBV-targeting guide sequence portion
  source 1..20: mol_type = other RNA
gcccactcccataggaattt

SEQ ID NO: 3705 - RNA, 20 nt, synthetic construct
  misc_feature 1..20: note = HBV-targeting guide sequence portion
  source 1..20: mol_type = other RNA
gcccaggatgatgggatggg

SEQ ID NO: 3706 - RNA, 20 nt, synthetic construct
  misc_feature 1..20: note = HBV-targeting guide sequence portion
  source 1..20: mol_type = other RNA
gcccatatgagtgttgacat

SEQ ID NO: 3707 - RNA, 20 nt, synthetic construct
  misc_feature 1..20: note = HBV-targeting guide sequence portion
  source 1..20: mol_type = other RNA
gcccatgaaattaagagaat

SEQ ID NO: 3708 - RNA, 20 nt, synthetic construct
  misc_feature 1..20: note = HBV-targeting guide sequence portion
  source 1..20: mol_type = other RNA
gccccaaccagtgggggttg

SEQ ID NO: 3709 - RNA, 20 nt, synthetic construct
  misc_feature 1..20: note = HBV-targeting guide sequence portion
  source 1..20: mol_type = other RNA
gccccaagcggcctcgagat

SEQ ID NO: 3710 - RNA, 20 nt, synthetic construct
  misc_feature 1..20: note = HBV-targeting guide sequence portion
  source 1..20: mol_type = other RNA
gccccatgctgtagctcttg

SEQ ID NO: 3711 - RNA, 20 nt, synthetic construct
  misc_feature 1..20: note = HBV-targeting guide sequence portion
  source 1..20: mol_type = other RNA
gcccccaataccacatcatc

SEQ ID NO: 3712 - RNA, 20 nt, synthetic construct
  misc_feature 1..20: note = HBV-targeting guide sequence portion
  source 1..20: mol_type = other RNA
gccccgtaaaatttcccacc

SEQ ID NO: 3713 - RNA, 20 nt, synthetic construct
  misc_feature 1..20: note = HBV-targeting guide sequence portion
  source 1..20: mol_type = other RNA
gccccgtggtcggtcggaac

SEQ ID NO: 3714 - RNA, 20 nt, synthetic construct
  misc_feature 1..20: note = HBV-targeting guide sequence portion
  source 1..20: mol_type = other RNA
gcccctatcctatcaacact

SEQ ID NO: 3715 - RNA, 20 nt, synthetic construct
  misc_feature 1..20: note = HBV-targeting guide sequence portion
  source 1..20: mol_type = other RNA
gccccttttacacaatgtgg

SEQ ID NO: 3716 - RNA, 20 nt, synthetic construct
  misc_feature 1..20: note = HBV-targeting guide sequence portion
  source 1..20: mol_type = other RNA
gcccgaatgctccagctcct

SEQ ID NO: 3717 - RNA, 20 nt, synthetic construct
  misc_feature 1..20: note = HBV-targeting guide sequence portion
  source 1..20: mol_type = other RNA
gcccgcttacagttaatgag

SEQ ID NO: 3718 - RNA, 20 nt, synthetic construct
  misc_feature 1..20: note = HBV-targeting guide sequence portion
  source 1..20: mol_type = other RNA
gcccgtttctcttggctcag

SEQ ID NO: 3719 - RNA, 20 nt, synthetic construct
  misc_feature 1..20: note = HBV-targeting guide sequence portion
  source 1..20: mol_type = other RNA
gccctaaagccacccaaggc

SEQ ID NO: 3720 - RNA, 20 nt, synthetic construct
  misc_feature 1..20: note = HBV-targeting guide sequence portion
  source 1..20: mol_type = other RNA
gccctacgaaccactgaaca

SEQ ID NO: 3721 - RNA, 20 nt, synthetic construct
  misc_feature 1..20: note = HBV-targeting guide sequence portion
  source 1..20: mol_type = other RNA
gccctcaggctcagggcata

SEQ ID NO: 3722 - RNA, 20 nt, synthetic construct
  misc_feature 1..20: note = HBV-targeting guide sequence portion
  source 1..20: mol_type = other RNA
gccctgagcctgagggctcc

SEQ ID NO: 3723 - RNA, 20 nt, synthetic construct
  misc_feature 1..20: note = HBV-targeting guide sequence portion
  source 1..20: mol_type = other RNA
gccctgtcgtcctcttctct

SEQ ID NO: 3724 - RNA, 20 nt, synthetic construct
  misc_feature 1..20: note = HBV-targeting guide sequence portion
  source 1..20: mol_type = other RNA
gcccttggataagggtatta

SEQ ID NO: 3725 - RNA, 20 nt, synthetic construct
  misc_feature 1..20: note = HBV-targeting guide sequence portion
  source 1..20: mol_type = other RNA
gcccttgtatgcatgtattc

SEQ ID NO: 3726 - RNA, 20 nt, synthetic construct
  misc_feature 1..20: note = HBV-targeting guide sequence portion
  source 1..20: mol_type = other RNA
gccgacgggacgtaaacaaa

SEQ ID NO: 3727 - RNA, 20 nt, synthetic construct
  misc_feature 1..20: note = HBV-targeting guide sequence portion
  source 1..20: mol_type = other RNA
gccgatccatactgcggaac

SEQ ID NO: 3728 - RNA, 20 nt, synthetic construct
  misc_feature 1..20: note = HBV-targeting guide sequence portion
  source 1..20: mol_type = other RNA
gccgcagacacatccagcga

SEQ ID NO: 3729 - RNA, 20 nt, synthetic construct
  misc_feature 1..20: note = HBV-targeting guide sequence portion
  source 1..20: mol_type = other RNA
gccgcagctctgtatcggga

SEQ ID NO: 3730 - RNA, 20 nt, synthetic construct
  misc_feature 1..20: note = HBV-targeting guide sequence portion
  source 1..20: mol_type = other RNA
gccgcgtcgcagaagatctc

SEQ ID NO: 3731 - RNA, 20 nt, synthetic construct
  misc_feature 1..20: note = HBV-targeting guide sequence portion
  source 1..20: mol_type = other RNA
gccgcttggggccctgtcgt

SEQ ID NO: 3732 - RNA, 20 nt, synthetic construct
  misc_feature 1..20: note = HBV-targeting guide sequence portion
  source 1..20: mol_type = other RNA
gccgcttgttttgctcgcag

SEQ ID NO: 3733 - RNA, 20 nt, synthetic construct
  misc_feature 1..20: note = HBV-targeting guide sequence portion
  source 1..20: mol_type = other RNA
gccggaaaggttccacgcat

SEQ ID NO: 3734 - RNA, 20 nt, synthetic construct
  misc_feature 1..20: note = HBV-targeting guide sequence portion
  source 1..20: mol_type = other RNA
gccggaccgtgtgcacttcg

SEQ ID NO: 3735 - RNA, 20 nt, synthetic construct
  misc_feature 1..20: note = HBV-targeting guide sequence portion
  source 1..20: mol_type = other RNA
gccggtctggagcaaacatt

SEQ ID NO: 3736 - RNA, 20 nt, synthetic construct
  misc_feature 1..20: note = HBV-targeting guide sequence portion
  source 1..20: mol_type = other RNA
gccgtcctgactggcgattg

SEQ ID NO: 3737 - RNA, 20 nt, synthetic construct
  misc_feature 1..20: note = HBV-targeting guide sequence portion
  source 1..20: mol_type = other RNA
gccgttccgaccgaccacgg

SEQ ID NO: 3738 - RNA, 20 nt, synthetic construct
  misc_feature 1..20: note = HBV-targeting guide sequence portion
  source 1..20: mol_type = other RNA
gccgttgcctggcaacgggg

SEQ ID NO: 3739 - RNA, 20 nt, synthetic construct
  misc_feature 1..20: note = HBV-targeting guide sequence portion
  source 1..20: mol_type = other RNA
gcctaaagttcagacaacta

SEQ ID NO: 3740 - RNA, 20 nt, synthetic construct
  misc_feature 1..20: note = HBV-targeting guide sequence portion
  source 1..20: mol_type = other RNA
gcctaatcatctcttgttca

SEQ ID NO: 3741 - RNA, 20 nt, synthetic construct
  misc_feature 1..20: note = HBV-targeting guide sequence portion
  source 1..20: mol_type = other RNA
gcctacaaactgttcacatt

SEQ ID NO: 3742 - RNA, 20 nt, synthetic construct
  misc_feature 1..20: note = HBV-targeting guide sequence portion
  source 1..20: mol_type = other RNA
gcctacagcctcctagtaca

SEQ ID NO: 3743 - RNA, 20 nt, synthetic construct
  misc_feature 1..20: note = HBV-targeting guide sequence portion
  source 1..20: mol_type = other RNA
gcctaccccgctgtctccac

SEQ ID NO: 3744 - RNA, 20 nt, synthetic construct
  misc_feature 1..20: note = HBV-targeting guide sequence portion
  source 1..20: mol_type = other RNA
gcctagcagccatgggaacg

SEQ ID NO: 3745 - RNA, 20 nt, synthetic construct
  misc_feature 1..20: note = HBV-targeting guide sequence portion
  source 1..20: mol_type = other RNA
gcctatgaccaagccccaac

SEQ ID NO: 3746 - RNA, 20 nt, synthetic construct
  misc_feature 1..20: note = HBV-targeting guide sequence portion
  source 1..20: mol_type = other RNA
gcctattgattggaaagtgt

SEQ ID NO: 3747 - RNA, 20 nt, synthetic construct
  misc_feature 1..20: note = HBV-targeting guide sequence portion
  source 1..20: mol_type = other RNA
gcctcaaggtcggtcgttga

SEQ ID NO: 3748 - RNA, 20 nt, synthetic construct
  misc_feature 1..20: note = HBV-targeting guide sequence portion
  source 1..20: mol_type = other RNA
gcctcagcccgtttctcttg

SEQ ID NO: 3749 - RNA, 20 nt, synthetic construct
  misc_feature 1..20: note = HBV-targeting guide sequence portion
  source 1..20: mol_type = other RNA
gcctcatcttcttgttggtt

SEQ ID NO: 3750 - RNA, 20 nt, synthetic construct
  misc_feature 1..20: note = HBV-targeting guide sequence portion
  source 1..20: mol_type = other RNA
gcctcattctgtgggtcacc

SEQ ID NO: 3751 - RNA, 20 nt, synthetic construct
  misc_feature 1..20: note = HBV-targeting guide sequence portion
  source 1..20: mol_type = other RNA
gcctccaagctgtgccttgg

SEQ ID NO: 3752 - RNA, 20 nt, synthetic construct
  misc_feature 1..20: note = HBV-targeting guide sequence portion
  source 1..20: mol_type = other RNA
gcctccgtgcggtggggtga

SEQ ID NO: 3753 - RNA, 20 nt, synthetic construct
  misc_feature 1..20: note = HBV-targeting guide sequence portion
  source 1..20: mol_type = other RNA
gcctcctagtacaaagatca

SEQ ID NO: 3754 - RNA, 20 nt, synthetic construct
  misc_feature 1..20: note = HBV-targeting guide sequence portion
  source 1..20: mol_type = other RNA
gcctcctgcctctaccaatc

SEQ ID NO: 3755 - RNA, 20 nt, synthetic construct
  misc_feature 1..20: note = HBV-targeting guide sequence portion
  source 1..20: mol_type = other RNA
gcctcgagatgggtcgtccg

SEQ ID NO: 3756 - RNA, 20 nt, synthetic construct
  misc_feature 1..20: note = HBV-targeting guide sequence portion
  source 1..20: mol_type = other RNA
gcctcgcagacgaagatctc

SEQ ID NO: 3757 - RNA, 20 nt, synthetic construct
  misc_feature 1..20: note = HBV-targeting guide sequence portion
  source 1..20: mol_type = other RNA
gcctcgtcgtctaacaacac

SEQ ID NO: 3758 - RNA, 20 nt, synthetic construct
  misc_feature 1..20: note = HBV-targeting guide sequence portion
  source 1..20: mol_type = other RNA
gcctctaccaatcgccagtc

SEQ ID NO: 3759 - RNA, 20 nt, synthetic construct
  misc_feature 1..20: note = HBV-targeting guide sequence portion
  source 1..20: mol_type = other RNA
gcctctcacatatcgtcaat

SEQ ID NO: 3760 - RNA, 20 nt, synthetic construct
  misc_feature 1..20: note = HBV-targeting guide sequence portion
  source 1..20: mol_type = other RNA
gcctctcactctgggatctt

SEQ ID NO: 3761 - RNA, 20 nt, synthetic construct
  misc_feature 1..20: note = HBV-targeting guide sequence portion
  source 1..20: mol_type = other RNA
gcctgaggatgagtgtttct

SEQ ID NO: 3762 - RNA, 20 nt, synthetic construct
  misc_feature 1..20: note = HBV-targeting guide sequence portion
  source 1..20: mol_type = other RNA
gcctgagggctccaccccaa

SEQ ID NO: 3763 - RNA, 20 nt, synthetic construct
  misc_feature 1..20: note = HBV-targeting guide sequence portion
  source 1..20: mol_type = other RNA
gcctgagtgcagtatggtga

SEQ ID NO: 3764 - RNA, 20 nt, synthetic construct
  misc_feature 1..20: note = HBV-targeting guide sequence portion
  source 1..20: mol_type = other RNA
gcctgccgttccgaccgacc

SEQ ID NO: 3765 - RNA, 20 nt, synthetic construct
  misc_feature 1..20: note = HBV-targeting guide sequence portion
  source 1..20: mol_type = other RNA
gcctgctaggttttatccta

SEQ ID NO: 3766 - RNA, 20 nt, synthetic construct
  misc_feature 1..20: note = HBV-targeting guide sequence portion
  source 1..20: mol_type = other RNA
gcctgcttagattgaataca

SEQ ID NO: 3767 - RNA, 20 nt, synthetic construct
  misc_feature 1..20: note = HBV-targeting guide sequence portion
  source 1..20: mol_type = other RNA
gcctggcaacggggtaaagg

SEQ ID NO: 3768 - RNA, 20 nt, synthetic construct
  misc_feature 1..20: note = HBV-targeting guide sequence portion
  source 1..20: mol_type = other RNA
gcctgtaacacgagcagggg

SEQ ID NO: 3769 - RNA, 20 nt, synthetic construct
  misc_feature 1..20: note = HBV-targeting guide sequence portion
  source 1..20: mol_type = other RNA
gcctgtatctccctgctggt

SEQ ID NO: 3770 - RNA, 20 nt, synthetic construct
  misc_feature 1..20: note = HBV-targeting guide sequence portion
  source 1..20: mol_type = other RNA
gcctgttaaccgggagtttt

SEQ ID NO: 3771 - RNA, 20 nt, synthetic construct
  misc_feature 1..20: note = HBV-targeting guide sequence portion
  source 1..20: mol_type = other RNA
gccttcagagcaaactccaa

SEQ ID NO: 3772 - RNA, 20 nt, synthetic construct
  misc_feature 1..20: note = HBV-targeting guide sequence portion
  source 1..20: mol_type = other RNA
gccttccatagagtgtgtaa

SEQ ID NO: 3773 - RNA, 20 nt, synthetic construct
  misc_feature 1..20: note = HBV-targeting guide sequence portion
  source 1..20: mol_type = other RNA
gccttctcatctgccggacc

SEQ ID NO: 3774 - RNA, 20 nt, synthetic construct
  misc_feature 1..20: note = HBV-targeting guide sequence portion
  source 1..20: mol_type = other RNA
gccttctgacttctttcctt

SEQ ID NO: 3775 - RNA, 20 nt, synthetic construct
  misc_feature 1..20: note = HBV-targeting guide sequence portion
  source 1..20: mol_type = other RNA
gccttggagtctcctgagca

SEQ ID NO: 3776 - RNA, 20 nt, synthetic construct
  misc_feature 1..20: note = HBV-targeting guide sequence portion
  source 1..20: mol_type = other RNA
gccttgggtggctttagggc

SEQ ID NO: 3777 - RNA, 20 nt, synthetic construct
  misc_feature 1..20: note = HBV-targeting guide sequence portion
  source 1..20: mol_type = other RNA
gccttgtaagttggcgaaaa

SEQ ID NO: 3778 - RNA, 20 nt, synthetic construct
  misc_feature 1..20: note = HBV-targeting guide sequence portion
  source 1..20: mol_type = other RNA
gcctttctgtgtaaacaata

SEQ ID NO: 3779 - RNA, 20 nt, synthetic construct
  misc_feature 1..20: note = HBV-targeting guide sequence portion
  source 1..20: mol_type = other RNA
gccttttggggtggagccct

SEQ ID NO: 3780 - RNA, 20 nt, synthetic construct
  misc_feature 1..20: note = HBV-targeting guide sequence portion
  source 1..20: mol_type = other RNA
gcgaaaaagtgaaagcctgc

SEQ ID NO: 3781 - RNA, 20 nt, synthetic construct
  misc_feature 1..20: note = HBV-targeting guide sequence portion
  source 1..20: mol_type = other RNA
gcgaagtgcacacggtccgg

SEQ ID NO: 3782 - RNA, 20 nt, synthetic construct
  misc_feature 1..20: note = HBV-targeting guide sequence portion
  source 1..20: mol_type = other RNA
gcgaatccacactccaaaag

SEQ ID NO: 3783 - RNA, 20 nt, synthetic construct
  misc_feature 1..20: note = HBV-targeting guide sequence portion
  source 1..20: mol_type = other RNA
gcgaattttggccaagacac

SEQ ID NO: 3784 - RNA, 20 nt, synthetic construct
  misc_feature 1..20: note = HBV-targeting guide sequence portion
  source 1..20: mol_type = other RNA
gcgacgcggcgattgagatc

SEQ ID NO: 3785 - RNA, 20 nt, synthetic construct
  misc_feature 1..20: note = HBV-targeting guide sequence portion
  source 1..20: mol_type = other RNA
gcgacgtgcagaggtgaagc

SEQ ID NO: 3786 - RNA, 20 nt, synthetic construct
  misc_feature 1..20: note = HBV-targeting guide sequence portion
  source 1..20: mol_type = other RNA
gcgagcaaaacaagcggcta

SEQ ID NO: 3787 - RNA, 20 nt, synthetic construct
  misc_feature 1..20: note = HBV-targeting guide sequence portion
  source 1..20: mol_type = other RNA
gcgaggcgagggagttcttc

SEQ ID NO: 3788 - RNA, 20 nt, synthetic construct
  misc_feature 1..20: note = HBV-targeting guide sequence portion
  source 1..20: mol_type = other RNA
gcgagggagttcttcttcta

SEQ ID NO: 3789 - RNA, 20 nt, synthetic construct
  misc_feature 1..20: note = HBV-targeting guide sequence portion
  source 1..20: mol_type = other RNA
gcgataaccaggacaagttg

SEQ ID NO: 3790 - RNA, 20 nt, synthetic construct
  misc_feature 1..20: note = HBV-targeting guide sequence portion
  source 1..20: mol_type = other RNA
gcgattgagatcttcgtctg

SEQ ID NO: 3791 - RNA, 20 nt, synthetic construct
  misc_feature 1..20: note = HBV-targeting guide sequence portion
  source 1..20: mol_type = other RNA
gcgattggtagaggcaggag

SEQ ID NO: 3792 - RNA, 20 nt, synthetic construct
  misc_feature 1..20: note = HBV-targeting guide sequence portion
  source 1..20: mol_type = other RNA
gcgcaccagcaccatgcaac

SEQ ID NO: 3793 - RNA, 20 nt, synthetic construct
  misc_feature 1..20: note = HBV-targeting guide sequence portion
  source 1..20: mol_type = other RNA
gcgcacctctctttacgcgg

SEQ ID NO: 3794 - RNA, 20 nt, synthetic construct
  misc_feature 1..20: note = HBV-targeting guide sequence portion
  source 1..20: mol_type = other RNA
gcgcagaccaatttatgcct

SEQ ID NO: 3795 - RNA, 20 nt, synthetic construct
  misc_feature 1..20: note = HBV-targeting guide sequence portion
  source 1..20: mol_type = other RNA
gcgcaggatccagttggcag

SEQ ID NO: 3796 - RNA, 20 nt, synthetic construct
  misc_feature 1..20: note = HBV-targeting guide sequence portion
  source 1..20: mol_type = other RNA
gcgcagggtccccaatcctc

SEQ ID NO: 3797 - RNA, 20 nt, synthetic construct
  misc_feature 1..20: note = HBV-targeting guide sequence portion
  source 1..20: mol_type = other RNA
gcgcatgcgtggaacctttc

SEQ ID NO: 3798 - RNA, 20 nt, synthetic construct
  misc_feature 1..20: note = HBV-targeting guide sequence portion
  source 1..20: mol_type = other RNA
gcgccccgtggtcggtcgga

SEQ ID NO: 3799 - RNA, 20 nt, synthetic construct
  misc_feature 1..20: note = HBV-targeting guide sequence portion
  source 1..20: mol_type = other RNA
gcgccgacgggacgtaaaca

SEQ ID NO: 3800 - RNA, 20 nt, synthetic construct
  misc_feature 1..20: note = HBV-targeting guide sequence portion
  source 1..20: mol_type = other RNA
gcgcctcattctgtgggtca

SEQ ID NO: 3801 - RNA, 20 nt, synthetic construct
  misc_feature 1..20: note = HBV-targeting guide sequence portion
  source 1..20: mol_type = other RNA
gcgcgggacgtcctttgttt

SEQ ID NO: 3802 - RNA, 20 nt, synthetic construct
  misc_feature 1..20: note = HBV-targeting guide sequence portion
  source 1..20: mol_type = other RNA
gcgctatgtgttgacactct

SEQ ID NO: 3803 - RNA, 20 nt, synthetic construct
  misc_feature 1..20: note = HBV-targeting guide sequence portion
  source 1..20: mol_type = other RNA
gcgctgaacatggagaacat

SEQ ID NO: 3804 - RNA, 20 nt, synthetic construct
  misc_feature 1..20: note = HBV-targeting guide sequence portion
  source 1..20: mol_type = other RNA
gcgctgaatcccgcggacga

SEQ ID NO: 3805 - RNA, 20 nt, synthetic construct
  misc_feature 1..20: note = HBV-targeting guide sequence portion
  source 1..20: mol_type = other RNA
gcgctgatggcctatgacca

SEQ ID NO: 3806 - RNA, 20 nt, synthetic construct
  misc_feature 1..20: note = HBV-targeting guide sequence portion
  source 1..20: mol_type = other RNA
gcggaactcctagccgcttg

SEQ ID NO: 3807 - RNA, 20 nt, synthetic construct
  misc_feature 1..20: note = HBV-targeting guide sequence portion
  source 1..20: mol_type = other RNA
gcggacgacccatctcgagg

SEQ ID NO: 3808 - RNA, 20 nt, synthetic construct
  misc_feature 1..20: note = HBV-targeting guide sequence portion
  source 1..20: mol_type = other RNA
gcggactccccgtctgtgcc

SEQ ID NO: 3809 - RNA, 20 nt, synthetic construct
  misc_feature 1..20: note = HBV-targeting guide sequence portion
  source 1..20: mol_type = other RNA
gcggatttgctggcaaggtt

SEQ ID NO: 3810 - RNA, 20 nt, synthetic construct
  misc_feature 1..20: note = HBV-targeting guide sequence portion
  source 1..20: mol_type = other RNA
gcggcctcgagatgggtcgt

SEQ ID NO: 3811 - RNA, 20 nt, synthetic construct
  misc_feature 1..20: note = HBV-targeting guide sequence portion
  source 1..20: mol_type = other RNA
gcggcgattgagatcttcgt

SEQ ID NO: 3812 - RNA, 20 nt, synthetic construct
  misc_feature 1..20: note = HBV-targeting guide sequence portion
  source 1..20: mol_type = other RNA
gcggcggtatctagaagatc

SEQ ID NO: 3813 - RNA, 20 nt, synthetic construct
  misc_feature 1..20: note = HBV-targeting guide sequence portion
  source 1..20: mol_type = other RNA
gcggcgttttatcatcttcc

SEQ ID NO: 3814 - RNA, 20 nt, synthetic construct
  misc_feature 1..20: note = HBV-targeting guide sequence portion
  source 1..20: mol_type = other RNA
gcggctaggagttccgcagt

SEQ ID NO: 3815 - RNA, 20 nt, synthetic construct
  misc_feature 1..20: note = HBV-targeting guide sequence portion
  source 1..20: mol_type = other RNA
gcgggacgtcctttgtttac

SEQ ID NO: 3816 - RNA, 20 nt, synthetic construct
  misc_feature 1..20: note = HBV-targeting guide sequence portion
  source 1..20: mol_type = other RNA
gcgggagaggacaacagagt

SEQ ID NO: 3817 - RNA, 20 nt, synthetic construct
  misc_feature 1..20: note = HBV-targeting guide sequence portion
  source 1..20: mol_type = other RNA
gcgggattcagcgccgacgg

SEQ ID NO: 3818 - RNA, 20 nt, synthetic construct
  misc_feature 1..20: note = HBV-targeting guide sequence portion
  source 1..20: mol_type = other RNA
gcgggcctacaaactgttca

SEQ ID NO: 3819 - RNA, 20 nt, synthetic construct
  misc_feature 1..20: note = HBV-targeting guide sequence portion
  source 1..20: mol_type = other RNA
gcggggtaggctgccgtcct

SEQ ID NO: 3820 - RNA, 20 nt, synthetic construct
  misc_feature 1..20: note = HBV-targeting guide sequence portion
  source 1..20: mol_type = other RNA
gcggggttttccttgttgac

SEQ ID NO: 3821 - RNA, 20 nt, synthetic construct
  misc_feature 1..20: note = HBV-targeting guide sequence portion
  source 1..20: mol_type = other RNA
gcgggtgttttatataagag

SEQ ID NO: 3822 - RNA, 20 nt, synthetic construct
  misc_feature 1..20: note = HBV-targeting guide sequence portion
  source 1..20: mol_type = other RNA
gcggtataaagggactcaag

SEQ ID NO: 3823 - RNA, 20 nt, synthetic construct
  misc_feature 1..20: note = HBV-targeting guide sequence portion
  source 1..20: mol_type = other RNA
gcggtatctagaagatctcg

SEQ ID NO: 3824 - RNA, 20 nt, synthetic construct
  misc_feature 1..20: note = HBV-targeting guide sequence portion
  source 1..20: mol_type = other RNA
gcggtattgtgaggattctt

SEQ ID NO: 3825 - RNA, 20 nt, synthetic construct
  misc_feature 1..20: note = HBV-targeting guide sequence portion
  source 1..20: mol_type = other RNA
gcggtggggtgaaccctagc

SEQ ID NO: 3826 - RNA, 20 nt, synthetic construct
  misc_feature 1..20: note = HBV-targeting guide sequence portion
  source 1..20: mol_type = other RNA
gcgtaaagagaggtgcgccc

SEQ ID NO: 3827 - RNA, 20 nt, synthetic construct
  misc_feature 1..20: note = HBV-targeting guide sequence portion
  source 1..20: mol_type = other RNA
gcgtcgcagaagatctcaat

SEQ ID NO: 3828 - RNA, 20 nt, synthetic construct
  misc_feature 1..20: note = HBV-targeting guide sequence portion
  source 1..20: mol_type = other RNA
gcgtctggccagggatcctt

SEQ ID NO: 3829 - RNA, 20 nt, synthetic construct
  misc_feature 1..20: note = HBV-targeting guide sequence portion
  source 1..20: mol_type = other RNA
gcgtggaacctttccggctc

SEQ ID NO: 3830 - RNA, 20 nt, synthetic construct
  misc_feature 1..20: note = HBV-targeting guide sequence portion
  source 1..20: mol_type = other RNA
gcgttcacggtggtctccat

SEQ ID NO: 3831 - RNA, 20 nt, synthetic construct
  misc_feature 1..20: note = HBV-targeting guide sequence portion
  source 1..20: mol_type = other RNA
gcgttttatcatcttcctct

SEQ ID NO: 3832 - RNA, 20 nt, synthetic construct
  misc_feature 1..20: note = HBV-targeting guide sequence portion
  source 1..20: mol_type = other RNA
gctacagcatggggcagaat

SEQ ID NO: 3833 - RNA, 20 nt, synthetic construct
  misc_feature 1..20: note = HBV-targeting guide sequence portion
  source 1..20: mol_type = other RNA
gctacctgggtgggtactaa

SEQ ID NO: 3834 - RNA, 20 nt, synthetic construct
  misc_feature 1..20: note = HBV-targeting guide sequence portion
  source 1..20: mol_type = other RNA
gctactgtggagttactctc

SEQ ID NO: 3835 - RNA, 20 nt, synthetic construct
  misc_feature 1..20: note = HBV-targeting guide sequence portion
  source 1..20: mol_type = other RNA
gctagagtcattagttctcc

SEQ ID NO: 3836 - RNA, 20 nt, synthetic construct
  misc_feature 1..20: note = HBV-targeting guide sequence portion
  source 1..20: mol_type = other RNA
gctaggagttccgcagtatg

SEQ ID NO: 3837 - RNA, 20 nt, synthetic construct
  misc_feature 1..20: note = HBV-targeting guide sequence portion
  source 1..20: mol_type = other RNA
gctaggctgtgctgccaact

SEQ ID NO: 3838 - RNA, 20 nt, synthetic construct
  misc_feature 1..20: note = HBV-targeting guide sequence portion
  source 1..20: mol_type = other RNA
gctagggttcaccccaccgc

SEQ ID NO: 3839 - RNA, 20 nt, synthetic construct
  misc_feature 1..20: note = HBV-targeting guide sequence portion
  source 1..20: mol_type = other RNA
gctaggttttatcctaaatt

SEQ ID NO: 3840 - RNA, 20 nt, synthetic construct
  misc_feature 1..20: note = HBV-targeting guide sequence portion
  source 1..20: mol_type = other RNA
gctatgcctcatcttcttgt

SEQ ID NO: 3841 - RNA, 20 nt, synthetic construct
  misc_feature 1..20: note = HBV-targeting guide sequence portion
  source 1..20: mol_type = other RNA
gctatgtcattgattgttgg

SEQ ID NO: 3842 - RNA, 20 nt, synthetic construct
  misc_feature 1..20: note = HBV-targeting guide sequence portion
  source 1..20: mol_type = other RNA
gctatgtgttgacactctct

SEQ ID NO: 3843 - RNA, 20 nt, synthetic construct
  misc_feature 1..20: note = HBV-targeting guide sequence portion
  source 1..20: mol_type = other RNA
gctcaaggaacctctatgta

SEQ ID NO: 3844 - RNA, 20 nt, synthetic construct
  misc_feature 1..20: note = HBV-targeting guide sequence portion
  source 1..20: mol_type = other RNA
gctcaggagactccaaggca

SEQ ID NO: 3845 - RNA, 20 nt, synthetic construct
  misc_feature 1..20: note = HBV-targeting guide sequence portion
  source 1..20: mol_type = other RNA
gctcagggcataatgcaaac

SEQ ID NO: 3846 - RNA, 20 nt, synthetic construct
  misc_feature 1..20: note = HBV-targeting guide sequence portion
  source 1..20: mol_type = other RNA
gctcagtttactagtgccat

SEQ ID NO: 3847 - RNA, 20 nt, synthetic construct
  misc_feature 1..20: note = HBV-targeting guide sequence portion
  source 1..20: mol_type = other RNA
gctccaaattctttatatgg

SEQ ID NO: 3848 - RNA, 20 nt, synthetic construct
  misc_feature 1..20: note = HBV-targeting guide sequence portion
  source 1..20: mol_type = other RNA
gctccaccccaaaaggcctc

SEQ ID NO: 3849 - RNA, 20 nt, synthetic construct
  misc_feature 1..20: note = HBV-targeting guide sequence portion
  source 1..20: mol_type = other RNA
gctccagaccggctgcgagc

SEQ ID NO: 3850 - RNA, 20 nt, synthetic construct
  misc_feature 1..20: note = HBV-targeting guide sequence portion
  source 1..20: mol_type = other RNA
gctccagctcctaccttgtt

SEQ ID NO: 3851 - RNA, 20 nt, synthetic construct
  misc_feature 1..20: note = HBV-targeting guide sequence portion
  source 1..20: mol_type = other RNA
gctccagttcaggaacagta

SEQ ID NO: 3852 - RNA, 20 nt, synthetic construct
  misc_feature 1..20: note = HBV-targeting guide sequence portion
  source 1..20: mol_type = other RNA
gctcctaccttgttggcgtc

SEQ ID NO: 3853 - RNA, 20 nt, synthetic construct
  misc_feature 1..20: note = HBV-targeting guide sequence portion
  source 1..20: mol_type = other RNA
gctcctctgccgatccatac

SEQ ID NO: 3854 - RNA, 20 nt, synthetic construct
  misc_feature 1..20: note = HBV-targeting guide sequence portion
  source 1..20: mol_type = other RNA
gctcgcagccggtctggagc

SEQ ID NO: 3855 - RNA, 20 nt, synthetic construct
  misc_feature 1..20: note = HBV-targeting guide sequence portion
  source 1..20: mol_type = other RNA
gctcgtgttacaggcggggt

SEQ ID NO: 3856 - RNA, 20 nt, synthetic construct
  misc_feature 1..20: note = HBV-targeting guide sequence portion
  source 1..20: mol_type = other RNA
gctctgaaggctgggtccaa

SEQ ID NO: 3857 - RNA, 20 nt, synthetic construct
  misc_feature 1..20: note = HBV-targeting guide sequence portion
  source 1..20: mol_type = other RNA
gctctgtatcgggatgcctt

SEQ ID NO: 3858 - RNA, 20 nt, synthetic construct
  misc_feature 1..20: note = HBV-targeting guide sequence portion
  source 1..20: mol_type = other RNA
gctcttgttcccaagaatat

SEQ ID NO: 3859 - RNA, 20 nt, synthetic construct
  misc_feature 1..20: note = HBV-targeting guide sequence portion
  source 1..20: mol_type = other RNA
gctgaacatggagaacatca

SEQ ID NO: 3860 - RNA, 20 nt, synthetic construct
  misc_feature 1..20: note = HBV-targeting guide sequence portion
  source 1..20: mol_type = other RNA
gctgaatcccgcggacgacc

SEQ ID NO: 3861 - RNA, 20 nt, synthetic construct
  misc_feature 1..20: note = HBV-targeting guide sequence portion
  source 1..20: mol_type = other RNA
gctgaggcccactcccatag

SEQ ID NO: 3862 - RNA, 20 nt, synthetic construct
  misc_feature 1..20: note = HBV-targeting guide sequence portion
  source 1..20: mol_type = other RNA
gctgatgcaacccccactgg

SEQ ID NO: 3863 - RNA, 20 nt, synthetic construct
  misc_feature 1..20: note = HBV-targeting guide sequence portion
  source 1..20: mol_type = other RNA
gctgatggcctatgaccaag

SEQ ID NO: 3864 - RNA, 20 nt, synthetic construct
  misc_feature 1..20: note = HBV-targeting guide sequence portion
  source 1..20: mol_type = other RNA
gctgccaactggatcctgcg

SEQ ID NO: 3865 - RNA, 20 nt, synthetic construct
  misc_feature 1..20: note = HBV-targeting guide sequence portion
  source 1..20: mol_type = other RNA
gctgccccttttacacaatg

SEQ ID NO: 3866 - RNA, 20 nt, synthetic construct
  misc_feature 1..20: note = HBV-targeting guide sequence portion
  source 1..20: mol_type = other RNA
gctgccgtcctgactggcga

SEQ ID NO: 3867 - RNA, 20 nt, synthetic construct
  misc_feature 1..20: note = HBV-targeting guide sequence portion
  source 1..20: mol_type = other RNA
gctgcgagcaaaacaagcgg

SEQ ID NO: 3868 - RNA, 20 nt, synthetic construct
  misc_feature 1..20: note = HBV-targeting guide sequence portion
  source 1..20: mol_type = other RNA
gctgcggcggtatctagaag

SEQ ID NO: 3869 - RNA, 20 nt, synthetic construct
  misc_feature 1..20: note = HBV-targeting guide sequence portion
  source 1..20: mol_type = other RNA
gctgctaggctgtgctgcca

SEQ ID NO: 3870 - RNA, 20 nt, synthetic construct
  misc_feature 1..20: note = HBV-targeting guide sequence portion
  source 1..20: mol_type = other RNA
gctgctatgcctcatcttct

SEQ ID NO: 3871 - RNA, 20 nt, synthetic construct
  misc_feature 1..20: note = HBV-targeting guide sequence portion
  source 1..20: mol_type = other RNA
gctggagcattcgggctagg

SEQ ID NO: 3872 - RNA, 20 nt, synthetic construct
  misc_feature 1..20: note = HBV-targeting guide sequence portion
  source 1..20: mol_type = other RNA
gctggaggagtgcgaatcca

SEQ ID NO: 3873 - RNA, 20 nt, synthetic construct
  misc_feature 1..20: note = HBV-targeting guide sequence portion
  source 1..20: mol_type = other RNA
gctggatgtgtctgcggcgt

SEQ ID NO: 3874 - RNA, 20 nt, synthetic construct
  misc_feature 1..20: note = HBV-targeting guide sequence portion
  source 1..20: mol_type = other RNA
gctggcaaggtttgcattat

SEQ ID NO: 3875 - RNA, 20 nt, synthetic construct
  misc_feature 1..20: note = HBV-targeting guide sequence portion
  source 1..20: mol_type = other RNA
gctggggagaactaatgact

SEQ ID NO: 3876 - RNA, 20 nt, synthetic construct
  misc_feature 1..20: note = HBV-targeting guide sequence portion
  source 1..20: mol_type = other RNA
gctgggtccaactggtggtc

SEQ ID NO: 3877 - RNA, 20 nt, synthetic construct
  misc_feature 1..20: note = HBV-targeting guide sequence portion
  source 1..20: mol_type = other RNA
gctggtgcgcagaccaattt

SEQ ID NO: 3878 - RNA, 20 nt, synthetic construct
  misc_feature 1..20: note = HBV-targeting guide sequence portion
  source 1..20: mol_type = other RNA
gctggtggaaagattctgcc

SEQ ID NO: 3879 - RNA, 20 nt, synthetic construct
  misc_feature 1..20: note = HBV-targeting guide sequence portion
  source 1..20: mol_type = other RNA
gctggtggctccagttcagg

SEQ ID NO: 3880 - RNA, 20 nt, synthetic construct
  misc_feature 1..20: note = HBV-targeting guide sequence portion
  source 1..20: mol_type = other RNA
gctggtggttgatgatcctg

SEQ ID NO: 3881 - RNA, 20 nt, synthetic construct
  misc_feature 1..20: note = HBV-targeting guide sequence portion
  source 1..20: mol_type = other RNA
gctgtacaaaaccttcggat

SEQ ID NO: 3882 - RNA, 20 nt, synthetic construct
  misc_feature 1..20: note = HBV-targeting guide sequence portion
  source 1..20: mol_type = other RNA
gctgtacagacttggccccc

SEQ ID NO: 3883 - RNA, 20 nt, synthetic construct
  misc_feature 1..20: note = HBV-targeting guide sequence portion
  source 1..20: mol_type = other RNA
gctgtagctcttgttcccaa

SEQ ID NO: 3884 - RNA, 20 nt, synthetic construct
  misc_feature 1..20: note = HBV-targeting guide sequence portion
  source 1..20: mol_type = other RNA
gctgtaggcataaattggtc

SEQ ID NO: 3885 - RNA, 20 nt, synthetic construct
  misc_feature 1..20: note = HBV-targeting guide sequence portion
  source 1..20: mol_type = other RNA
gctgtctccacctctgagaa

SEQ ID NO: 3886 - RNA, 20 nt, synthetic construct
  misc_feature 1..20: note = HBV-targeting guide sequence portion
  source 1..20: mol_type = other RNA
gctgtgccttgggtggcttt

SEQ ID NO: 3887 - RNA, 20 nt, synthetic construct
  misc_feature 1..20: note = HBV-targeting guide sequence portion
  source 1..20: mol_type = other RNA
gctgtgctgccaactggatc

SEQ ID NO: 3888 - RNA, 20 nt, synthetic construct
  misc_feature 1..20: note = HBV-targeting guide sequence portion
  source 1..20: mol_type = other RNA
gctgttaccaattttctttt

SEQ ID NO: 3889 - RNA, 20 nt, synthetic construct
  misc_feature 1..20: note = HBV-targeting guide sequence portion
  source 1..20: mol_type = other RNA
gcttacagttaatgagaaaa

SEQ ID NO: 3890 - RNA, 20 nt, synthetic construct
  misc_feature 1..20: note = HBV-targeting guide sequence portion
  source 1..20: mol_type = other RNA
gcttagattgaatacatgca

SEQ ID NO: 3891 - RNA, 20 nt, synthetic construct
  misc_feature 1..20: note = HBV-targeting guide sequence portion
  source 1..20: mol_type = other RNA
gcttatagaccaccaaatgc

SEQ ID NO: 3892 - RNA, 20 nt, synthetic construct
  misc_feature 1..20: note = HBV-targeting guide sequence portion
  source 1..20: mol_type = other RNA
gcttcacctctgcacgtcgc

SEQ ID NO: 3893 - RNA, 20 nt, synthetic construct
  misc_feature 1..20: note = HBV-targeting guide sequence portion
  source 1..20: mol_type = other RNA
gcttgaacagtaggacatga

SEQ ID NO: 3894 - RNA, 20 nt, synthetic construct
  misc_feature 1..20: note = HBV-targeting guide sequence portion
  source 1..20: mol_type = other RNA
gcttgatcttctaaattagt

SEQ ID NO: 3895 - RNA, 20 nt, synthetic construct
  misc_feature 1..20: note = HBV-targeting guide sequence portion
  source 1..20: mol_type = other RNA
gcttgcctgagtgcagtatg

SEQ ID NO: 3896 - RNA, 20 nt, synthetic construct
  misc_feature 1..20: note = HBV-targeting guide sequence portion
  source 1..20: mol_type = other RNA
gcttggaggcttgaacagta

SEQ ID NO: 3897 - RNA, 20 nt, synthetic construct
  misc_feature 1..20: note = HBV-targeting guide sequence portion
  source 1..20: mol_type = other RNA
gcttggggccctgtcgtcct

SEQ ID NO: 3898 - RNA, 20 nt, synthetic construct
  misc_feature 1..20: note = HBV-targeting guide sequence portion
  source 1..20: mol_type = other RNA
gcttggtcataggccatcag

SEQ ID NO: 3899 - RNA, 20 nt, synthetic construct
  misc_feature 1..20: note = HBV-targeting guide sequence portion
  source 1..20: mol_type = other RNA
gcttgttttgctcgcagccg

SEQ ID NO: 3900 - RNA, 20 nt, synthetic construct
  misc_feature 1..20: note = HBV-targeting guide sequence portion
  source 1..20: mol_type = other RNA
gctttaatgcccttgtatgc

SEQ ID NO: 3901 - RNA, 20 nt, synthetic construct
  misc_feature 1..20: note = HBV-targeting guide sequence portion
  source 1..20: mol_type = other RNA
gctttagggcatggacattg

SEQ ID NO: 3902 - RNA, 20 nt, synthetic construct
  misc_feature 1..20: note = HBV-targeting guide sequence portion
  source 1..20: mol_type = other RNA
gctttattcttctactgtac

SEQ ID NO: 3903 - RNA, 20 nt, synthetic construct
  misc_feature 1..20: note = HBV-targeting guide sequence portion
  source 1..20: mol_type = other RNA
gctttcactttttcgccaac

SEQ ID NO: 3904 - RNA, 20 nt, synthetic construct
  misc_feature 1..20: note = HBV-targeting guide sequence portion
  source 1..20: mol_type = other RNA
gctttcagttatatggatga

SEQ ID NO: 3905 - RNA, 20 nt, synthetic construct
  misc_feature 1..20: note = HBV-targeting guide sequence portion
  source 1..20: mol_type = other RNA
gctttcccccactgtttggc

SEQ ID NO: 3906 - RNA, 20 nt, synthetic construct
  misc_feature 1..20: note = HBV-targeting guide sequence portion
  source 1..20: mol_type = other RNA
gctttcggaaaattcctatg

SEQ ID NO: 3907 - RNA, 20 nt, synthetic construct
  misc_feature 1..20: note = HBV-targeting guide sequence portion
  source 1..20: mol_type = other RNA
ggaaaacaccctcttttcct

SEQ ID NO: 3908 - RNA, 20 nt, synthetic construct
  misc_feature 1..20: note = HBV-targeting guide sequence portion
  source 1..20: mol_type = other RNA
ggaaaaccccgcctgtaaca

SEQ ID NO: 3909 - RNA, 20 nt, synthetic construct
  misc_feature 1..20: note = HBV-targeting guide sequence portion
  source 1..20: mol_type = other RNA
ggaaaagagggtgttttcca

SEQ ID NO: 3910 - RNA, 20 nt, synthetic construct
  misc_feature 1..20: note = HBV-targeting guide sequence portion
  source 1..20: mol_type = other RNA
ggaaaattcctatgggagtg

SEQ ID NO: 3911 - RNA, 20 nt, synthetic construct
  misc_feature 1..20: note = HBV-targeting guide sequence portion
  source 1..20: mol_type = other RNA
ggaaacataccttgatagtc

SEQ ID NO: 3912 - RNA, 20 nt, synthetic construct
  misc_feature 1..20: note = HBV-targeting guide sequence portion
  source 1..20: mol_type = other RNA
ggaaactgcacctgtattcc

SEQ ID NO: 3913 - RNA, 20 nt, synthetic construct
  misc_feature 1..20: note = HBV-targeting guide sequence portion
  source 1..20: mol_type = other RNA
ggaaagaagtcagaaggcaa

SEQ ID NO: 3914 - RNA, 20 nt, synthetic construct
  misc_feature 1..20: note = HBV-targeting guide sequence portion
  source 1..20: mol_type = other RNA
ggaaagaatcccagaggatt

SEQ ID NO: 3915 - RNA, 20 nt, synthetic construct
  misc_feature 1..20: note = HBV-targeting guide sequence portion
  source 1..20: mol_type = other RNA
ggaaagattctgccccatgc

SEQ ID NO: 3916 - RNA, 20 nt, synthetic construct
  misc_feature 1..20: note = HBV-targeting guide sequence portion
  source 1..20: mol_type = other RNA
ggaaagccctacgaaccact

SEQ ID NO: 3917 - RNA, 20 nt, synthetic construct
  misc_feature 1..20: note = HBV-targeting guide sequence portion
  source 1..20: mol_type = other RNA
ggaaaggttccacgcatgcg

SEQ ID NO: 3918 - RNA, 20 nt, synthetic construct
  misc_feature 1..20: note = HBV-targeting guide sequence portion
  source 1..20: mol_type = other RNA
ggaaagtgtgtcaacgaatt

SEQ ID NO: 3919 - RNA, 20 nt, synthetic construct
  misc_feature 1..20: note = HBV-targeting guide sequence portion
  source 1..20: mol_type = other RNA
ggaaattttacggggcttta

SEQ ID NO: 3920 - RNA, 20 nt, synthetic construct
  misc_feature 1..20: note = HBV-targeting guide sequence portion
  source 1..20: mol_type = other RNA
ggaacaagagctacagcatg

SEQ ID NO: 3921 - RNA, 20 nt, synthetic construct
  misc_feature 1..20: note = HBV-targeting guide sequence portion
  source 1..20: mol_type = other RNA
ggaacagggtttactgttcc

SEQ ID NO: 3922 - RNA, 20 nt, synthetic construct
  misc_feature 1..20: note = HBV-targeting guide sequence portion
  source 1..20: mol_type = other RNA
ggaacagtaaaccctgttcc

SEQ ID NO: 3923 - RNA, 20 nt, synthetic construct
  misc_feature 1..20: note = HBV-targeting guide sequence portion
  source 1..20: mol_type = other RNA
ggaacctctatgtatccctc

SEQ ID NO: 3924 - RNA, 20 nt, synthetic construct
  misc_feature 1..20: note = HBV-targeting guide sequence portion
  source 1..20: mol_type = other RNA
ggaacctttccggctcctct

SEQ ID NO: 3925 - RNA, 20 nt, synthetic construct
  misc_feature 1..20: note = HBV-targeting guide sequence portion
  source 1..20: mol_type = other RNA
ggaacgatgtatatttgcgg

SEQ ID NO: 3926 - RNA, 20 nt, synthetic construct
  misc_feature 1..20: note = HBV-targeting guide sequence portion
  source 1..20: mol_type = other RNA
ggaacggcaggcagagaaga

SEQ ID NO: 3927 - RNA, 20 nt, synthetic construct
  misc_feature 1..20: note = HBV-targeting guide sequence portion
  source 1..20: mol_type = other RNA
ggaactaccgtgtgtcttgg

SEQ ID NO: 3928 - RNA, 20 nt, synthetic construct
  misc_feature 1..20: note = HBV-targeting guide sequence portion
  source 1..20: mol_type = other RNA
ggaactcctagccgcttgtt

SEQ ID NO: 3929 - RNA, 20 nt, synthetic construct
  misc_feature 1..20: note = HBV-targeting guide sequence portion
  source 1..20: mol_type = other RNA
ggaagagaaacggtcctaga

SEQ ID NO: 3930 - RNA, 20 nt, synthetic construct
  misc_feature 1..20: note = HBV-targeting guide sequence portion
  source 1..20: mol_type = other RNA
ggaagatgataaaacgccgc

SEQ ID NO: 3931 - RNA, 20 nt, synthetic construct
  misc_feature 1..20: note = HBV-targeting guide sequence portion
  source 1..20: mol_type = other RNA
ggaaggaaagaagtcagaag

SEQ ID NO: 3932 - RNA, 20 nt, synthetic construct
  misc_feature 1..20: note = HBV-targeting guide sequence portion
  source 1..20: mol_type = other RNA
ggaaggcgggtgttttatat

SEQ ID NO: 3933 - RNA, 20 nt, synthetic construct
  misc_feature 1..20: note = HBV-targeting guide sequence portion
  source 1..20: mol_type = other RNA
ggaagtaatgattaactaga

SEQ ID NO: 3934 - RNA, 20 nt, synthetic construct
  misc_feature 1..20: note = HBV-targeting guide sequence portion
  source 1..20: mol_type = other RNA
ggaagtgttgataggatagg

SEQ ID NO: 3935 - RNA, 20 nt, synthetic construct
  misc_feature 1..20: note = HBV-targeting guide sequence portion
  source 1..20: mol_type = other RNA
ggaatacaggtgcagtttcc

SEQ ID NO: 3936 - RNA, 20 nt, synthetic construct
  misc_feature 1..20: note = HBV-targeting guide sequence portion
  source 1..20: mol_type = other RNA
ggaatcctgatgtgatgttc

SEQ ID NO: 3937 - RNA, 20 nt, synthetic construct
  misc_feature 1..20: note = HBV-targeting guide sequence portion
  source 1..20: mol_type = other RNA
ggaattagaggacagacggg

SEQ ID NO: 3938 - RNA, 20 nt, synthetic construct
  misc_feature 1..20: note = HBV-targeting guide sequence portion
  source 1..20: mol_type = other RNA
ggaattttccgaaagcccag

SEQ ID NO: 3939 - RNA, 20 nt, synthetic construct
  misc_feature 1..20: note = HBV-targeting guide sequence portion
  source 1..20: mol_type = other RNA
ggacaacagagttgtcagtc

SEQ ID NO: 3940 - RNA, 20 nt, synthetic construct
  misc_feature 1..20: note = HBV-targeting guide sequence portion
  source 1..20: mol_type = other RNA
ggacaagttggaggacagga

SEQ ID NO: 3941 - RNA, 20 nt, synthetic construct
  misc_feature 1..20: note = HBV-targeting guide sequence portion
  source 1..20: mol_type = other RNA
ggacagacgggaaacatacc

SEQ ID NO: 3942 - RNA, 20 nt, synthetic construct
  misc_feature 1..20: note = HBV-targeting guide sequence portion
  source 1..20: mol_type = other RNA
ggacaggaggttggtgagtg

SEQ ID NO: 3943 - RNA, 20 nt, synthetic construct
  misc_feature 1..20: note = HBV-targeting guide sequence portion
  source 1..20: mol_type = other RNA
ggacatgaacaagagatgat

SEQ ID NO: 3944 - RNA, 20 nt, synthetic construct
  misc_feature 1..20: note = HBV-targeting guide sequence portion
  source 1..20: mol_type = other RNA
ggacattgacccatataaag

SEQ ID NO: 3945 - RNA, 20 nt, synthetic construct
  misc_feature 1..20: note = HBV-targeting guide sequence portion
  source 1..20: mol_type = other RNA
ggacccagccttcagagcaa

SEQ ID NO: 3946 - RNA, 20 nt, synthetic construct
  misc_feature 1..20: note = HBV-targeting guide sequence portion
  source 1..20: mol_type = other RNA
ggacccctgctcgtgttaca

SEQ ID NO: 3947 - RNA, 20 nt, synthetic construct
  misc_feature 1..20: note = HBV-targeting guide sequence portion
  source 1..20: mol_type = other RNA
ggaccctgcagaacctgcac

SEQ ID NO: 3948 - RNA, 20 nt, synthetic construct
  misc_feature 1..20: note = HBV-targeting guide sequence portion
  source 1..20: mol_type = other RNA
ggaccctgcgctgaacatgg

SEQ ID NO: 3949 - RNA, 20 nt, synthetic construct
  misc_feature 1..20: note = HBV-targeting guide sequence portion
  source 1..20: mol_type = other RNA
ggaccgtgtgcacttcgctt

SEQ ID NO: 3950 - RNA, 20 nt, synthetic construct
  misc_feature 1..20: note = HBV-targeting guide sequence portion
  source 1..20: mol_type = other RNA
ggaccgtttctcttccaaaa

SEQ ID NO: 3951 - RNA, 20 nt, synthetic construct
  misc_feature 1..20: note = HBV-targeting guide sequence portion
  source 1..20: mol_type = other RNA
ggacctagtagtcagttatg

SEQ ID NO: 3952 - RNA, 20 nt, synthetic construct
  misc_feature 1..20: note = HBV-targeting guide sequence portion
  source 1..20: mol_type = other RNA
ggacctgcctcgtcgtctaa

SEQ ID NO: 3953 - RNA, 20 nt, synthetic construct
  misc_feature 1..20: note = HBV-targeting guide sequence portion
  source 1..20: mol_type = other RNA
ggacgacagggccccaagcg

SEQ ID NO: 3954 - RNA, 20 nt, synthetic construct
  misc_feature 1..20: note = HBV-targeting guide sequence portion
  source 1..20: mol_type = other RNA
ggacgacccatctcgaggcc

SEQ ID NO: 3955 - RNA, 20 nt, synthetic construct
  misc_feature 1..20: note = HBV-targeting guide sequence portion
  source 1..20: mol_type = other RNA
ggacggcagcctaccccgct

SEQ ID NO: 3956 - RNA, 20 nt, synthetic construct
  misc_feature 1..20: note = HBV-targeting guide sequence portion
  source 1..20: mol_type = other RNA
ggacgtaaacaaaggacgtc

SEQ ID NO: 3957 - RNA, 20 nt, synthetic construct
  misc_feature 1..20: note = HBV-targeting guide sequence portion
  source 1..20: mol_type = other RNA
ggacgtcccgcgcaggatcc

SEQ ID NO: 3958 - RNA, 20 nt, synthetic construct
  misc_feature 1..20: note = HBV-targeting guide sequence portion
  source 1..20: mol_type = other RNA
ggacgtcctttgtttacgtc

SEQ ID NO: 3959 - RNA, 20 nt, synthetic construct
  misc_feature 1..20: note = HBV-targeting guide sequence portion
  source 1..20: mol_type = other RNA
ggactatcaaggtatgtttc

SEQ ID NO: 3960 - RNA, 20 nt, synthetic construct
  misc_feature 1..20: note = HBV-targeting guide sequence portion
  source 1..20: mol_type = other RNA
ggactcaagatgctgtacag

SEQ ID NO: 3961 - RNA, 20 nt, synthetic construct
  misc_feature 1..20: note = HBV-targeting guide sequence portion
  source 1..20: mol_type = other RNA
ggactcataaggtgggaaat

SEQ ID NO: 3962 - RNA, 20 nt, synthetic construct
  misc_feature 1..20: note = HBV-targeting guide sequence portion
  source 1..20: mol_type = other RNA
ggactccccgtctgtgcctt

SEQ ID NO: 3963 - RNA, 20 nt, synthetic construct
  misc_feature 1..20: note = HBV-targeting guide sequence portion
  source 1..20: mol_type = other RNA
ggactctctgcaatgtcaac

SEQ ID NO: 3964 - RNA, 20 nt, synthetic construct
  misc_feature 1..20: note = HBV-targeting guide sequence portion
  source 1..20: mol_type = other RNA
ggactcttggactctctgca

SEQ ID NO: 3965 - RNA, 20 nt, synthetic construct
  misc_feature 1..20: note = HBV-targeting guide sequence portion
  source 1..20: mol_type = other RNA
ggactgacaactctgttgtc

SEQ ID NO: 3966 - RNA, 20 nt, synthetic construct
  misc_feature 1..20: note = HBV-targeting guide sequence portion
  source 1..20: mol_type = other RNA
ggactgcgaattttggccaa

SEQ ID NO: 3967 - RNA, 20 nt, synthetic construct
  misc_feature 1..20: note = HBV-targeting guide sequence portion
  source 1..20: mol_type = other RNA
ggacttcaatcccaacaagg

SEQ ID NO: 3968 - RNA, 20 nt, synthetic construct
  misc_feature 1..20: note = HBV-targeting guide sequence portion
  source 1..20: mol_type = other RNA
ggacttctctcaattttcta

SEQ ID NO: 3969 - RNA, 20 nt, synthetic construct
  misc_feature 1..20: note = HBV-targeting guide sequence portion
  source 1..20: mol_type = other RNA
ggagaacatcacatcaggat

SEQ ID NO: 3970 - RNA, 20 nt, synthetic construct
  misc_feature 1..20: note = HBV-targeting guide sequence portion
  source 1..20: mol_type = other RNA
ggagaactaatgactctagc

SEQ ID NO: 3971 - RNA, 20 nt, synthetic construct
  misc_feature 1..20: note = HBV-targeting guide sequence portion
  source 1..20: mol_type = other RNA
ggagacagcggggtaggctg

SEQ ID NO: 3972 - RNA, 20 nt, synthetic construct
  misc_feature 1..20: note = HBV-targeting guide sequence portion
  source 1..20: mol_type = other RNA
ggagaccaccgtgaacgccc

SEQ ID NO: 3973 - RNA, 20 nt, synthetic construct
  misc_feature 1..20: note = HBV-targeting guide sequence portion
  source 1..20: mol_type = other RNA
ggagactccaaggcatcccg

SEQ ID NO: 3974 - RNA, 20 nt, synthetic construct
  misc_feature 1..20: note = HBV-targeting guide sequence portion
  source 1..20: mol_type = other RNA
ggagacttgtgttgttagac

SEQ ID NO: 3975 - RNA, 20 nt, synthetic construct
  misc_feature 1..20: note = HBV-targeting guide sequence portion
  source 1..20: mol_type = other RNA
ggagaggacaacagagttgt

SEQ ID NO: 3976 - RNA, 20 nt, synthetic construct
  misc_feature 1..20: note = HBV-targeting guide sequence portion
  source 1..20: mol_type = other RNA
ggagatacaggcctctcact

SEQ ID NO: 3977 - RNA, 20 nt, synthetic construct
  misc_feature 1..20: note = HBV-targeting guide sequence portion
  source 1..20: mol_type = other RNA
ggagattagattaatgatct

SEQ ID NO: 3978 - RNA, 20 nt, synthetic construct
  misc_feature 1..20: note = HBV-targeting guide sequence portion
  source 1..20: mol_type = other RNA
ggagcaaacattctcgggac

SEQ ID NO: 3979 - RNA, 20 nt, synthetic construct
  misc_feature 1..20: note = HBV-targeting guide sequence portion
  source 1..20: mol_type = other RNA
ggagcattcgggctagggtt

SEQ ID NO: 3980 - RNA, 20 nt, synthetic construct
  misc_feature 1..20: note = HBV-targeting guide sequence portion
  source 1..20: mol_type = other RNA
ggagccaccagcagggagat

SEQ ID NO: 3981 - RNA, 20 nt, synthetic construct
  misc_feature 1..20: note = HBV-targeting guide sequence portion
  source 1..20: mol_type = other RNA
ggagccctcaggctcagggc

SEQ ID NO: 3982 - RNA, 20 nt, synthetic construct
  misc_feature 1..20: note = HBV-targeting guide sequence portion
  source 1..20: mol_type = other RNA
ggagccggaaaggttccacg

SEQ ID NO: 3983 - RNA, 20 nt, synthetic construct
  misc_feature 1..20: note = HBV-targeting guide sequence portion
  source 1..20: mol_type = other RNA
ggagctactgtggagttact

SEQ ID NO: 3984 - RNA, 20 nt, synthetic construct
  misc_feature 1..20: note = HBV-targeting guide sequence portion
  source 1..20: mol_type = other RNA
ggagctggagcattcgggct

SEQ ID NO: 3985 - RNA, 20 nt, synthetic construct
  misc_feature 1..20: note = HBV-targeting guide sequence portion
  source 1..20: mol_type = other RNA
ggaggacaggaggttggtga

SEQ ID NO: 3986 - RNA, 20 nt, synthetic construct
  misc_feature 1..20: note = HBV-targeting guide sequence portion
  source 1..20: mol_type = other RNA
ggaggagattagattaatga

SEQ ID NO: 3987 - RNA, 20 nt, synthetic construct
  misc_feature 1..20: note = HBV-targeting guide sequence portion
  source 1..20: mol_type = other RNA
ggaggagtgcgaatccacac

SEQ ID NO: 3988 - RNA, 20 nt, synthetic construct
  misc_feature 1..20: note = HBV-targeting guide sequence portion
  source 1..20: mol_type = other RNA
ggaggagttgggggaggaga

SEQ ID NO: 3989 - RNA, 20 nt, synthetic construct
  misc_feature 1..20: note = HBV-targeting guide sequence portion
  source 1..20: mol_type = other RNA
ggaggccttttggggtggag

SEQ ID NO: 3990 - RNA, 20 nt, synthetic construct
  misc_feature 1..20: note = HBV-targeting guide sequence portion
  source 1..20: mol_type = other RNA
ggaggcggatttgctggcaa

SEQ ID NO: 3991 - RNA, 20 nt, synthetic construct
  misc_feature 1..20: note = HBV-targeting guide sequence portion
  source 1..20: mol_type = other RNA
ggaggctgtaggcataaatt

SEQ ID NO: 3992 - RNA, 20 nt, synthetic construct
  misc_feature 1..20: note = HBV-targeting guide sequence portion
  source 1..20: mol_type = other RNA
ggaggcttgaacagtaggac

SEQ ID NO: 3993 - RNA, 20 nt, synthetic construct
  misc_feature 1..20: note = HBV-targeting guide sequence portion
  source 1..20: mol_type = other RNA
ggagggatacatagaggttc

SEQ ID NO: 3994 - RNA, 20 nt, synthetic construct
  misc_feature 1..20: note = HBV-targeting guide sequence portion
  source 1..20: mol_type = other RNA
ggaggttggggactgcgaat

SEQ ID NO: 3995 - RNA, 20 nt, synthetic construct
  misc_feature 1..20: note = HBV-targeting guide sequence portion
  source 1..20: mol_type = other RNA
ggaggttggtgagtgattgg

SEQ ID NO: 3996 - RNA, 20 nt, synthetic construct
  misc_feature 1..20: note = HBV-targeting guide sequence portion
  source 1..20: mol_type = other RNA
ggagtccgcgtaaagagagg

SEQ ID NO: 3997 - RNA, 20 nt, synthetic construct
  misc_feature 1..20: note = HBV-targeting guide sequence portion
  source 1..20: mol_type = other RNA
ggagtcgtgcaggttctgca

SEQ ID NO: 3998 - RNA, 20 nt, synthetic construct
  misc_feature 1..20: note = HBV-targeting guide sequence portion
  source 1..20: mol_type = other RNA
ggagtctcctgagcattgtt

SEQ ID NO: 3999 - RNA, 20 nt, synthetic construct
  misc_feature 1..20: note = HBV-targeting guide sequence portion
  source 1..20: mol_type = other RNA
ggagtgcgaatccacactcc

SEQ ID NO: 4000 - RNA, 20 nt, synthetic construct
  misc_feature 1..20: note = HBV-targeting guide sequence portion
  source 1..20: mol_type = other RNA
ggagtgggcctcagcccgtt

SEQ ID NO: 4001 - RNA, 20 nt, synthetic construct
  misc_feature 1..20: note = HBV-targeting guide sequence portion
  source 1..20: mol_type = other RNA
ggagtgtggattcgcactcc

SEQ ID NO: 4002 - RNA, 20 nt, synthetic construct
  misc_feature 1..20: note = HBV-targeting guide sequence portion
  source 1..20: mol_type = other RNA
ggagttactctcgtttttgc

SEQ ID NO: 4003 - RNA, 20 nt, synthetic construct
  misc_feature 1..20: note = HBV-targeting guide sequence portion
  source 1..20: mol_type = other RNA
ggagttccgcagtatggatc

SEQ ID NO: 4004 - RNA, 20 nt, synthetic construct
  misc_feature 1..20: note = HBV-targeting guide sequence portion
  source 1..20: mol_type = other RNA
ggagttcttcttctagggga

SEQ ID NO: 4005 - RNA, 20 nt, synthetic construct
  misc_feature 1..20: note = HBV-targeting guide sequence portion
  source 1..20: mol_type = other RNA
ggagttgggggaggagatta

SEQ ID NO: 4006 - RNA, 20 nt, synthetic construct
  misc_feature 1..20: note = HBV-targeting guide sequence portion
  source 1..20: mol_type = other RNA
ggagtttgctctgaaggctg

SEQ ID NO: 4007 - RNA, 20 nt, synthetic construct
  misc_feature 1..20: note = HBV-targeting guide sequence portion
  source 1..20: mol_type = other RNA
ggagttttctgaaacattct

SEQ ID NO: 4008 - RNA, 20 nt, synthetic construct
  misc_feature 1..20: note = HBV-targeting guide sequence portion
  source 1..20: mol_type = other RNA
ggataaaacctagcaggcat

SEQ ID NO: 4009 - RNA, 20 nt, synthetic construct
  misc_feature 1..20: note = HBV-targeting guide sequence portion
  source 1..20: mol_type = other RNA
ggataaccacattgtgtaaa

SEQ ID NO: 4010 - RNA, 20 nt, synthetic construct
  misc_feature 1..20: note = HBV-targeting guide sequence portion
  source 1..20: mol_type = other RNA
ggataagggtattaaacctt

SEQ ID NO: 4011 - RNA, 20 nt, synthetic construct
  misc_feature 1..20: note = HBV-targeting guide sequence portion
  source 1..20: mol_type = other RNA
ggataataaggtttaatacc

SEQ ID NO: 4012 - RNA, 20 nt, synthetic construct
  misc_feature 1..20: note = HBV-targeting guide sequence portion
  source 1..20: mol_type = other RNA
ggatacatagaggttccttg

SEQ ID NO: 4013 - RNA, 20 nt, synthetic construct
  misc_feature 1..20: note = HBV-targeting guide sequence portion
  source 1..20: mol_type = other RNA
ggatactaacattgagatcc

SEQ ID NO: 4014 - RNA, 20 nt, synthetic construct
  misc_feature 1..20: note = HBV-targeting guide sequence portion
  source 1..20: mol_type = other RNA
ggataggggcatttggtggt

SEQ ID NO: 4015 - RNA, 20 nt, synthetic construct
  misc_feature 1..20: note = HBV-targeting guide sequence portion
  source 1..20: mol_type = other RNA
ggatcatcaaccaccagcac

SEQ ID NO: 4016 - RNA, 20 nt, synthetic construct
  misc_feature 1..20: note = HBV-targeting guide sequence portion
  source 1..20: mol_type = other RNA
ggatcattgccacaaaatca

SEQ ID NO: 4017 - RNA, 20 nt, synthetic construct
  misc_feature 1..20: note = HBV-targeting guide sequence portion
  source 1..20: mol_type = other RNA
ggatccagttggcagcacag

SEQ ID NO: 4018 - RNA, 20 nt, synthetic construct
  misc_feature 1..20: note = HBV-targeting guide sequence portion
  source 1..20: mol_type = other RNA
ggatccctggccagacgcca

SEQ ID NO: 4019 - RNA, 20 nt, synthetic construct
  misc_feature 1..20: note = HBV-targeting guide sequence portion
  source 1..20: mol_type = other RNA
ggatcctgcgcgggacgtcc

SEQ ID NO: 4020 - RNA, 20 nt, synthetic construct
  misc_feature 1..20: note = HBV-targeting guide sequence portion
  source 1..20: mol_type = other RNA
ggatccttgttgggattgaa

SEQ ID NO: 4021 - RNA, 20 nt, synthetic construct
  misc_feature 1..20: note = HBV-targeting guide sequence portion
  source 1..20: mol_type = other RNA
ggatcggcagaggagccgga

SEQ ID NO: 4022 - RNA, 20 nt, synthetic construct
  misc_feature 1..20: note = HBV-targeting guide sequence portion
  source 1..20: mol_type = other RNA
ggatctcaatgttagtatcc

SEQ ID NO: 4023 - RNA, 20 nt, synthetic construct
  misc_feature 1..20: note = HBV-targeting guide sequence portion
  source 1..20: mol_type = other RNA
ggatcttgcagagtttggtg

SEQ ID NO: 4024 - RNA, 20 nt, synthetic construct
  misc_feature 1..20: note = HBV-targeting guide sequence portion
  source 1..20: mol_type = other RNA
ggatgaagaggaagatgata

SEQ ID NO: 4025 - RNA, 20 nt, synthetic construct
  misc_feature 1..20: note = HBV-targeting guide sequence portion
  source 1..20: mol_type = other RNA
ggatgagtgtttctcagagg

SEQ ID NO: 4026 - RNA, 20 nt, synthetic construct
  misc_feature 1..20: note = HBV-targeting guide sequence portion
  source 1..20: mol_type = other RNA
ggatgatgggatgggaatac

SEQ ID NO: 4027 - RNA, 20 nt, synthetic construct
  misc_feature 1..20: note = HBV-targeting guide sequence portion
  source 1..20: mol_type = other RNA
ggatgatgtggtattggggg

SEQ ID NO: 4028 - RNA, 20 nt, synthetic construct
  misc_feature 1..20: note = HBV-targeting guide sequence portion
  source 1..20: mol_type = other RNA
ggatgccttggagtctcctg

SEQ ID NO: 4029 - RNA, 20 nt, synthetic construct
  misc_feature 1..20: note = HBV-targeting guide sequence portion
  source 1..20: mol_type = other RNA
ggatggaaactgcacctgta

SEQ ID NO: 4030 - RNA, 20 nt, synthetic construct
  misc_feature 1..20: note = HBV-targeting guide sequence portion
  source 1..20: mol_type = other RNA
ggatgggaatacaggtgcag

SEQ ID NO: 4031 - RNA, 20 nt, synthetic construct
  misc_feature 1..20: note = HBV-targeting guide sequence portion
  source 1..20: mol_type = other RNA
ggatgtgtctgcggcgtttt

SEQ ID NO: 4032 - RNA, 20 nt, synthetic construct
  misc_feature 1..20: note = HBV-targeting guide sequence portion
  source 1..20: mol_type = other RNA
ggattcagcgccgacgggac

SEQ ID NO: 4033 - RNA, 20 nt, synthetic construct
  misc_feature 1..20: note = HBV-targeting guide sequence portion
  source 1..20: mol_type = other RNA
ggattcctaggacccctgct

SEQ ID NO: 4034 - RNA, 20 nt, synthetic construct
  misc_feature 1..20: note = HBV-targeting guide sequence portion
  source 1..20: mol_type = other RNA
ggattcgcactcctccagct

SEQ ID NO: 4035 - RNA, 20 nt, synthetic construct
  misc_feature 1..20: note = HBV-targeting guide sequence portion
  source 1..20: mol_type = other RNA
ggattcttgtcaacaaggaa

SEQ ID NO: 4036 - RNA, 20 nt, synthetic construct
  misc_feature 1..20: note = HBV-targeting guide sequence portion
  source 1..20: mol_type = other RNA
ggattctttcccgaccacca

SEQ ID NO: 4037 - RNA, 20 nt, synthetic construct
  misc_feature 1..20: note = HBV-targeting guide sequence portion
  source 1..20: mol_type = other RNA
ggattgaagtcccaatctgg

SEQ ID NO: 4038 - RNA, 20 nt, synthetic construct
  misc_feature 1..20: note = HBV-targeting guide sequence portion
  source 1..20: mol_type = other RNA
ggattgctggtggaaagatt

SEQ ID NO: 4039 - RNA, 20 nt, synthetic construct
  misc_feature 1..20: note = HBV-targeting guide sequence portion
  source 1..20: mol_type = other RNA
ggattggggaccctgcgctg

SEQ ID NO: 4040 - RNA, 20 nt, synthetic construct
  misc_feature 1..20: note = HBV-targeting guide sequence portion
  source 1..20: mol_type = other RNA
ggattgttggagtttgctct

SEQ ID NO: 4041 - RNA, 20 nt, synthetic construct
  misc_feature 1..20: note = HBV-targeting guide sequence portion
  source 1..20: mol_type = other RNA
ggatttgctggcaaggtttg

SEQ ID NO: 4042 - RNA, 20 nt, synthetic construct
  misc_feature 1..20: note = HBV-targeting guide sequence portion
  source 1..20: mol_type = other RNA
ggcaaaaacgagagtaactc

SEQ ID NO: 4043 - RNA, 20 nt, synthetic construct
  misc_feature 1..20: note = HBV-targeting guide sequence portion
  source 1..20: mol_type = other RNA
ggcaacggccaggtctgtgc

SEQ ID NO: 4044 - RNA, 20 nt, synthetic construct
  misc_feature 1..20: note = HBV-targeting guide sequence portion
  source 1..20: mol_type = other RNA
ggcaacggggtaaaggttca

SEQ ID NO: 4045 - RNA, 20 nt, synthetic construct
  misc_feature 1..20: note = HBV-targeting guide sequence portion
  source 1..20: mol_type = other RNA
ggcaagaattggtgggcgtt

SEQ ID NO: 4046 - RNA, 20 nt, synthetic construct
  misc_feature 1..20: note = HBV-targeting guide sequence portion
  source 1..20: mol_type = other RNA
ggcaagcaattctttgctgg

SEQ ID NO: 4047 - RNA, 20 nt, synthetic construct
  misc_feature 1..20: note = HBV-targeting guide sequence portion
  source 1..20: mol_type = other RNA
ggcaaggtttgcattatgcc

SEQ ID NO: 4048 - RNA, 20 nt, synthetic construct
  misc_feature 1..20: note = HBV-targeting guide sequence portion
  source 1..20: mol_type = other RNA
ggcaagtatttggtgaattt

SEQ ID NO: 4049 - RNA, 20 nt, synthetic construct
  misc_feature 1..20: note = HBV-targeting guide sequence portion
  source 1..20: mol_type = other RNA
ggcaatgatccccaacaatc

SEQ ID NO: 4050 - RNA, 20 nt, synthetic construct
  misc_feature 1..20: note = HBV-targeting guide sequence portion
  source 1..20: mol_type = other RNA
ggcacagacctggccgttgc

SEQ ID NO: 4051 - RNA, 20 nt, synthetic construct
  misc_feature 1..20: note = HBV-targeting guide sequence portion
  source 1..20: mol_type = other RNA
ggcacagacggggagtccgc

SEQ ID NO: 4052 - RNA, 20 nt, synthetic construct
  misc_feature 1..20: note = HBV-targeting guide sequence portion
  source 1..20: mol_type = other RNA
ggcacagcttggaggcttga

SEQ ID NO: 4053 - RNA, 20 nt, synthetic construct
  misc_feature 1..20: note = HBV-targeting guide sequence portion
  source 1..20: mol_type = other RNA
ggcactagtaaactgagcca

SEQ ID NO: 4054 - RNA, 20 nt, synthetic construct
  misc_feature 1..20: note = HBV-targeting guide sequence portion
  source 1..20: mol_type = other RNA
ggcagaatctttccaccagc

SEQ ID NO: 4055 - RNA, 20 nt, synthetic construct
  misc_feature 1..20: note = HBV-targeting guide sequence portion
  source 1..20: mol_type = other RNA
ggcagagaagaggacgacag

SEQ ID NO: 4056 - RNA, 20 nt, synthetic construct
  misc_feature 1..20: note = HBV-targeting guide sequence portion
  source 1..20: mol_type = other RNA
ggcagaggagccggaaaggt

SEQ ID NO: 4057 - RNA, 20 nt, synthetic construct
  misc_feature 1..20: note = HBV-targeting guide sequence portion
  source 1..20: mol_type = other RNA
ggcagaggtgaaaaagttgc

SEQ ID NO: 4058 - RNA, 20 nt, synthetic construct
  misc_feature 1..20: note = HBV-targeting guide sequence portion
  source 1..20: mol_type = other RNA
ggcagatgagaaggcacaga

SEQ ID NO: 4059 - RNA, 20 nt, synthetic construct
  misc_feature 1..20: note = HBV-targeting guide sequence portion
  source 1..20: mol_type = other RNA
ggcagcaaaacccagaagac

SEQ ID NO: 4060 - RNA, 20 nt, synthetic construct
  misc_feature 1..20: note = HBV-targeting guide sequence portion
  source 1..20: mol_type = other RNA
ggcagcacagcctagcagcc

SEQ ID NO: 4061 - RNA, 20 nt, synthetic construct
  misc_feature 1..20: note = HBV-targeting guide sequence portion
  source 1..20: mol_type = other RNA
ggcagcctaccccgctgtct

SEQ ID NO: 4062 - RNA, 20 nt, synthetic construct
  misc_feature 1..20: note = HBV-targeting guide sequence portion
  source 1..20: mol_type = other RNA
ggcaggaggcggatttgctg

SEQ ID NO: 4063 - RNA, 20 nt, synthetic construct
  misc_feature 1..20: note = HBV-targeting guide sequence portion
  source 1..20: mol_type = other RNA
ggcaggcagagaagaggacg

SEQ ID NO: 4064 - RNA, 20 nt, synthetic construct
  misc_feature 1..20: note = HBV-targeting guide sequence portion
  source 1..20: mol_type = other RNA
ggcaggtcccctagaagaag

SEQ ID NO: 4065 - RNA, 20 nt, synthetic construct
  misc_feature 1..20: note = HBV-targeting guide sequence portion
  source 1..20: mol_type = other RNA
ggcagtagtcggaacagggt

SEQ ID NO: 4066 - RNA, 20 nt, synthetic construct
  misc_feature 1..20: note = HBV-targeting guide sequence portion
  source 1..20: mol_type = other RNA
ggcataaattggtctgcgca

SEQ ID NO: 4067 - RNA, 20 nt, synthetic construct
  misc_feature 1..20: note = HBV-targeting guide sequence portion
  source 1..20: mol_type = other RNA
ggcataatcaatttcaaccg

SEQ ID NO: 4068 - RNA, 20 nt, synthetic construct
  misc_feature 1..20: note = HBV-targeting guide sequence portion
  source 1..20: mol_type = other RNA
ggcataatgcaaaccttgcc

SEQ ID NO: 4069 - RNA, 20 nt, synthetic construct
  misc_feature 1..20: note = HBV-targeting guide sequence portion
  source 1..20: mol_type = other RNA
ggcatacttcaaagactgtt

SEQ ID NO: 4070 - RNA, 20 nt, synthetic construct
  misc_feature 1..20: note = HBV-targeting guide sequence portion
  source 1..20: mol_type = other RNA
ggcatagcagcaggatgaag

SEQ ID NO: 4071 - RNA, 20 nt, synthetic construct
  misc_feature 1..20: note = HBV-targeting guide sequence portion
  source 1..20: mol_type = other RNA
ggcatcccgatacagagctg

SEQ ID NO: 4072 - RNA, 20 nt, synthetic construct
  misc_feature 1..20: note = HBV-targeting guide sequence portion
  source 1..20: mol_type = other RNA
ggcatggacattgacccata

SEQ ID NO: 4073 - RNA, 20 nt, synthetic construct
  misc_feature 1..20: note = HBV-targeting guide sequence portion
  source 1..20: mol_type = other RNA
ggcattaaagcaggataacc

SEQ ID NO: 4074 - RNA, 20 nt, synthetic construct
  misc_feature 1..20: note = HBV-targeting guide sequence portion
  source 1..20: mol_type = other RNA
ggcatttggtggtctataag

SEQ ID NO: 4075 - RNA, 20 nt, synthetic construct
  misc_feature 1..20: note = HBV-targeting guide sequence portion
  source 1..20: mol_type = other RNA
ggccaaaattcgcagtcccc

SEQ ID NO: 4076 - RNA, 20 nt, synthetic construct
  misc_feature 1..20: note = HBV-targeting guide sequence portion
  source 1..20: mol_type = other RNA
ggccaagacacacggtagtt

SEQ ID NO: 4077 - RNA, 20 nt, synthetic construct
  misc_feature 1..20: note = HBV-targeting guide sequence portion
  source 1..20: mol_type = other RNA
ggccaagtctgtacagcatc

SEQ ID NO: 4078 - RNA, 20 nt, synthetic construct
  misc_feature 1..20: note = HBV-targeting guide sequence portion
  source 1..20: mol_type = other RNA
ggccagacgccaacaaggta

SEQ ID NO: 4079 - RNA, 20 nt, synthetic construct
  misc_feature 1..20: note = HBV-targeting guide sequence portion
  source 1..20: mol_type = other RNA
ggccagggatccttgttggg

SEQ ID NO: 4080 - RNA, 20 nt, synthetic construct
  misc_feature 1..20: note = HBV-targeting guide sequence portion
  source 1..20: mol_type = other RNA
ggccaggtctgtgccaagtg

SEQ ID NO: 4081 - RNA, 20 nt, synthetic construct
  misc_feature 1..20: note = HBV-targeting guide sequence portion
  source 1..20: mol_type = other RNA
ggccatcagcgcatgcgtgg

SEQ ID NO: 4082 - RNA, 20 nt, synthetic construct
  misc_feature 1..20: note = HBV-targeting guide sequence portion
  source 1..20: mol_type = other RNA
ggcccactcccataggaatt

SEQ ID NO: 4083 - RNA, 20 nt, synthetic construct
  misc_feature 1..20: note = HBV-targeting guide sequence portion
  source 1..20: mol_type = other RNA
ggcccatatgagtgttgaca

SEQ ID NO: 4084 - RNA, 20 nt, synthetic construct
  misc_feature 1..20: note = HBV-targeting guide sequence portion
  source 1..20: mol_type = other RNA
ggccccaagcggcctcgaga

SEQ ID NO: 4085 - RNA, 20 nt, synthetic construct
  misc_feature 1..20: note = HBV-targeting guide sequence portion
  source 1..20: mol_type = other RNA
ggcccccaataccacatcat

SEQ ID NO: 4086 - RNA, 20 nt, synthetic construct
  misc_feature 1..20: note = HBV-targeting guide sequence portion
  source 1..20: mol_type = other RNA
ggcccgcttacagttaatga

SEQ ID NO: 4087 - RNA, 20 nt, synthetic construct
  misc_feature 1..20: note = HBV-targeting guide sequence portion
  source 1..20: mol_type = other RNA
ggccctgtcgtcctcttctc

SEQ ID NO: 4088 - RNA, 20 nt, synthetic construct
  misc_feature 1..20: note = HBV-targeting guide sequence portion
  source 1..20: mol_type = other RNA
ggccgcttggggccctgtcg

SEQ ID NO: 4089 - RNA, 20 nt, synthetic construct
  misc_feature 1..20: note = HBV-targeting guide sequence portion
  source 1..20: mol_type = other RNA
ggccgttgcctggcaacggg

SEQ ID NO: 4090 - RNA, 20 nt, synthetic construct
  misc_feature 1..20: note = HBV-targeting guide sequence portion
  source 1..20: mol_type = other RNA
ggcctaaagttcagacaact

SEQ ID NO: 4091 - RNA, 20 nt, synthetic construct
  misc_feature 1..20: note = HBV-targeting guide sequence portion
  source 1..20: mol_type = other RNA
ggcctacaaactgttcacat

SEQ ID NO: 4092 - RNA, 20 nt, synthetic construct
  misc_feature 1..20: note = HBV-targeting guide sequence portion
  source 1..20: mol_type = other RNA
ggcctatgaccaagccccaa

SEQ ID NO: 4093 - RNA, 20 nt, synthetic construct
  misc_feature 1..20: note = HBV-targeting guide sequence portion
  source 1..20: mol_type = other RNA
ggcctattgattggaaagtg

SEQ ID NO: 4094 - RNA, 20 nt, synthetic construct
  misc_feature 1..20: note = HBV-targeting guide sequence portion
  source 1..20: mol_type = other RNA
ggcctcagcccgtttctctt

SEQ ID NO: 4095 - RNA, 20 nt, synthetic construct
  misc_feature 1..20: note = HBV-targeting guide sequence portion
  source 1..20: mol_type = other RNA
ggcctccgtgcggtggggtg

SEQ ID NO: 4096 - RNA, 20 nt, synthetic construct
  misc_feature 1..20: note = HBV-targeting guide sequence portion
  source 1..20: mol_type = other RNA
ggcctcgagatgggtcgtcc

SEQ ID NO: 4097 - RNA, 20 nt, synthetic construct
  misc_feature 1..20: note = HBV-targeting guide sequence portion
  source 1..20: mol_type = other RNA
ggcctctcactctgggatct

SEQ ID NO: 4098 - RNA, 20 nt, synthetic construct
  misc_feature 1..20: note = HBV-targeting guide sequence portion
  source 1..20: mol_type = other RNA
ggcctgaggatgagtgtttc

SEQ ID NO: 4099 - RNA, 20 nt, synthetic construct
  misc_feature 1..20: note = HBV-targeting guide sequence portion
  source 1..20: mol_type = other RNA
ggcctgtatctccctgctgg

SEQ ID NO: 4100 - RNA, 20 nt, synthetic construct
  misc_feature 1..20: note = HBV-targeting guide sequence portion
  source 1..20: mol_type = other RNA
ggcctgttaaccgggagttt

SEQ ID NO: 4101 - RNA, 20 nt, synthetic construct
  misc_feature 1..20: note = HBV-targeting guide sequence portion
  source 1..20: mol_type = other RNA
ggccttgtaagttggcgaaa

SEQ ID NO: 4102 - RNA, 20 nt, synthetic construct
  misc_feature 1..20: note = HBV-targeting guide sequence portion
  source 1..20: mol_type = other RNA
ggcctttctgtgtaaacaat

SEQ ID NO: 4103 - RNA, 20 nt, synthetic construct
  misc_feature 1..20: note = HBV-targeting guide sequence portion
  source 1..20: mol_type = other RNA
ggccttttggggtggagccc

SEQ ID NO: 4104 - RNA, 20 nt, synthetic construct
  misc_feature 1..20: note = HBV-targeting guide sequence portion
  source 1..20: mol_type = other RNA
ggcgaaaaagtgaaagcctg

SEQ ID NO: 4105 - RNA, 20 nt, synthetic construct
  misc_feature 1..20: note = HBV-targeting guide sequence portion
  source 1..20: mol_type = other RNA
ggcgagggagttcttcttct

SEQ ID NO: 4106 - RNA, 20 nt, synthetic construct
  misc_feature 1..20: note = HBV-targeting guide sequence portion
  source 1..20: mol_type = other RNA
ggcgattgagatcttcgtct

SEQ ID NO: 4107 - RNA, 20 nt, synthetic construct
  misc_feature 1..20: note = HBV-targeting guide sequence portion
  source 1..20: mol_type = other RNA
ggcgattggtagaggcagga

SEQ ID NO: 4108 - RNA, 20 nt, synthetic construct
  misc_feature 1..20: note = HBV-targeting guide sequence portion
  source 1..20: mol_type = other RNA
ggcgcacctctctttacgcg

SEQ ID NO: 4109 - RNA, 20 nt, synthetic construct
  misc_feature 1..20: note = HBV-targeting guide sequence portion
  source 1..20: mol_type = other RNA
ggcgctatgtgttgacactc

SEQ ID NO: 4110 - RNA, 20 nt, synthetic construct
  misc_feature 1..20: note = HBV-targeting guide sequence portion
  source 1..20: mol_type = other RNA
ggcgctgaatcccgcggacg

SEQ ID NO: 4111 - RNA, 20 nt, synthetic construct
  misc_feature 1..20: note = HBV-targeting guide sequence portion
  source 1..20: mol_type = other RNA
ggcggatttgctggcaaggt

SEQ ID NO: 4112 - RNA, 20 nt, synthetic construct
  misc_feature 1..20: note = HBV-targeting guide sequence portion
  source 1..20: mol_type = other RNA
ggcggggttttccttgttga

SEQ ID NO: 4113 - RNA, 20 nt, synthetic construct
  misc_feature 1..20: note = HBV-targeting guide sequence portion
  source 1..20: mol_type = other RNA
ggcgggtgttttatataaga

SEQ ID NO: 4114 - RNA, 20 nt, synthetic construct
  misc_feature 1..20: note = HBV-targeting guide sequence portion
  source 1..20: mol_type = other RNA
ggcggtatctagaagatctc

SEQ ID NO: 4115 - RNA, 20 nt, synthetic construct
  misc_feature 1..20: note = HBV-targeting guide sequence portion
  source 1..20: mol_type = other RNA
ggcgtctggccagggatcct

SEQ ID NO: 4116 - RNA, 20 nt, synthetic construct
  misc_feature 1..20: note = HBV-targeting guide sequence portion
  source 1..20: mol_type = other RNA
ggcgttcacggtggtctcca

SEQ ID NO: 4117 - RNA, 20 nt, synthetic construct
  misc_feature 1..20: note = HBV-targeting guide sequence portion
  source 1..20: mol_type = other RNA
ggcgttttatcatcttcctc

SEQ ID NO: 4118 - RNA, 20 nt, synthetic construct
  misc_feature 1..20: note = HBV-targeting guide sequence portion
  source 1..20: mol_type = other RNA
ggctaggagttccgcagtat

SEQ ID NO: 4119 - RNA, 20 nt, synthetic construct
  misc_feature 1..20: note = HBV-targeting guide sequence portion
  source 1..20: mol_type = other RNA
ggctagggttcaccccaccg

SEQ ID NO: 4120 - RNA, 20 nt, synthetic construct
  misc_feature 1..20: note = HBV-targeting guide sequence portion
  source 1..20: mol_type = other RNA
ggctatgtcattgattgttg

SEQ ID NO: 4121 - RNA, 20 nt, synthetic construct
  misc_feature 1..20: note = HBV-targeting guide sequence portion
  source 1..20: mol_type = other RNA
ggctcagggcataatgcaaa

SEQ ID NO: 4122 - RNA, 20 nt, synthetic construct
  misc_feature 1..20: note = HBV-targeting guide sequence portion
  source 1..20: mol_type = other RNA
ggctcagtttactagtgcca

SEQ ID NO: 4123 - RNA, 20 nt, synthetic construct
  misc_feature 1..20: note = HBV-targeting guide sequence portion
  source 1..20: mol_type = other RNA
ggctccaccccaaaaggcct

SEQ ID NO: 4124 - RNA, 20 nt, synthetic construct
  misc_feature 1..20: note = HBV-targeting guide sequence portion
  source 1..20: mol_type = other RNA
ggctccagttcaggaacagt

SEQ ID NO: 4125 - RNA, 20 nt, synthetic construct
  misc_feature 1..20: note = HBV-targeting guide sequence portion
  source 1..20: mol_type = other RNA
ggctcctctgccgatccata

SEQ ID NO: 4126 - RNA, 20 nt, synthetic construct
  misc_feature 1..20: note = HBV-targeting guide sequence portion
  source 1..20: mol_type = other RNA
ggctgaggcccactcccata

SEQ ID NO: 4127 - RNA, 20 nt, synthetic construct
  misc_feature 1..20: note = HBV-targeting guide sequence portion
  source 1..20: mol_type = other RNA
ggctgccgtcctgactggcg

SEQ ID NO: 4128 - RNA, 20 nt, synthetic construct
  misc_feature 1..20: note = HBV-targeting guide sequence portion
  source 1..20: mol_type = other RNA
ggctgcgagcaaaacaagcg

SEQ ID NO: 4129 - RNA, 20 nt, synthetic construct
  misc_feature 1..20: note = HBV-targeting guide sequence portion
  source 1..20: mol_type = other RNA
ggctgctaggctgtgctgcc

SEQ ID NO: 4130 - RNA, 20 nt, synthetic construct
  misc_feature 1..20: note = HBV-targeting guide sequence portion
  source 1..20: mol_type = other RNA
ggctgggtccaactggtggt

SEQ ID NO: 4131 - RNA, 20 nt, synthetic construct
  misc_feature 1..20: note = HBV-targeting guide sequence portion
  source 1..20: mol_type = other RNA
ggctgtaggcataaattggt

SEQ ID NO: 4132 - RNA, 20 nt, synthetic construct
  misc_feature 1..20: note = HBV-targeting guide sequence portion
  source 1..20: mol_type = other RNA
ggctgtgctgccaactggat

SEQ ID NO: 4133 - RNA, 20 nt, synthetic construct
  misc_feature 1..20: note = HBV-targeting guide sequence portion
  source 1..20: mol_type = other RNA
ggcttgaacagtaggacatg

SEQ ID NO: 4134 - RNA, 20 nt, synthetic construct
  misc_feature 1..20: note = HBV-targeting guide sequence portion
  source 1..20: mol_type = other RNA
ggcttggtcataggccatca

SEQ ID NO: 4135 - RNA, 20 nt, synthetic construct
  misc_feature 1..20: note = HBV-targeting guide sequence portion
  source 1..20: mol_type = other RNA
ggctttagggcatggacatt

SEQ ID NO: 4136 - RNA, 20 nt, synthetic construct
  misc_feature 1..20: note = HBV-targeting guide sequence portion
  source 1..20: mol_type = other RNA
ggctttattcttctactgta

SEQ ID NO: 4137 - RNA, 20 nt, synthetic construct
  misc_feature 1..20: note = HBV-targeting guide sequence portion
  source 1..20: mol_type = other RNA
ggctttcactttttcgccaa

SEQ ID NO: 4138 - RNA, 20 nt, synthetic construct
  misc_feature 1..20: note = HBV-targeting guide sequence portion
  source 1..20: mol_type = other RNA
ggctttcagttatatggatg

SEQ ID NO: 4139 - RNA, 20 nt, synthetic construct
  misc_feature 1..20: note = HBV-targeting guide sequence portion
  source 1..20: mol_type = other RNA
ggctttcccccactgtttgg

SEQ ID NO: 4140 - RNA, 20 nt, synthetic construct
  misc_feature 1..20: note = HBV-targeting guide sequence portion
  source 1..20: mol_type = other RNA
ggctttcggaaaattcctat

SEQ ID NO: 4141 - RNA, 20 nt, synthetic construct
  misc_feature 1..20: note = HBV-targeting guide sequence portion
  source 1..20: mol_type = other RNA
gggaaacataccttgatagt

SEQ ID NO: 4142 - RNA, 20 nt, synthetic construct
  misc_feature 1..20: note = HBV-targeting guide sequence portion
  source 1..20: mol_type = other RNA
gggaaagaatcccagaggat

SEQ ID NO: 4143 - RNA, 20 nt, synthetic construct
  misc_feature 1..20: note = HBV-targeting guide sequence portion
  source 1..20: mol_type = other RNA
gggaaagccctacgaaccac

SEQ ID NO: 4144 - RNA, 20 nt, synthetic construct
  misc_feature 1..20: note = HBV-targeting guide sequence portion
  source 1..20: mol_type = other RNA
gggaaattttacggggcttt

SEQ ID NO: 4145 - RNA, 20 nt, synthetic construct
  misc_feature 1..20: note = HBV-targeting guide sequence portion
  source 1..20: mol_type = other RNA
gggaacaagagctacagcat

SEQ ID NO: 4146 - RNA, 20 nt, synthetic construct
  misc_feature 1..20: note = HBV-targeting guide sequence portion
  source 1..20: mol_type = other RNA
gggaacgatgtatatttgcg

SEQ ID NO: 4147 - RNA, 20 nt, synthetic construct
  misc_feature 1..20: note = HBV-targeting guide sequence portion
  source 1..20: mol_type = other RNA
gggaactaccgtgtgtcttg

SEQ ID NO: 4148 - RNA, 20 nt, synthetic construct
  misc_feature 1..20: note = HBV-targeting guide sequence portion
  source 1..20: mol_type = other RNA
gggaatacaggtgcagtttc

SEQ ID NO: 4149 - RNA, 20 nt, synthetic construct
  misc_feature 1..20: note = HBV-targeting guide sequence portion
  source 1..20: mol_type = other RNA
gggaccctgcagaacctgca

SEQ ID NO: 4150 - RNA, 20 nt, synthetic construct
  misc_feature 1..20: note = HBV-targeting guide sequence portion
  source 1..20: mol_type = other RNA
gggaccctgcgctgaacatg

SEQ ID NO: 4151 - RNA, 20 nt, synthetic construct
  misc_feature 1..20: note = HBV-targeting guide sequence portion
  source 1..20: mol_type = other RNA
gggacctagtagtcagttat

SEQ ID NO: 4152 - RNA, 20 nt, synthetic construct
  misc_feature 1..20: note = HBV-targeting guide sequence portion
  source 1..20: mol_type = other RNA
gggacctgcctcgtcgtcta

SEQ ID NO: 4153 - RNA, 20 nt, synthetic construct
  misc_feature 1..20: note = HBV-targeting guide sequence portion
  source 1..20: mol_type = other RNA
gggacgtaaacaaaggacgt

SEQ ID NO: 4154 - RNA, 20 nt, synthetic construct
  misc_feature 1..20: note = HBV-targeting guide sequence portion
  source 1..20: mol_type = other RNA
gggacgtcctttgtttacgt

SEQ ID NO: 4155 - RNA, 20 nt, synthetic construct
  misc_feature 1..20: note = HBV-targeting guide sequence portion
  source 1..20: mol_type = other RNA
gggactcaagatgctgtaca

SEQ ID NO: 4156 - RNA, 20 nt, synthetic construct
  misc_feature 1..20: note = HBV-targeting guide sequence portion
  source 1..20: mol_type = other RNA
gggactgacaactctgttgt

SEQ ID NO: 4157 - RNA, 20 nt, synthetic construct
  misc_feature 1..20: note = HBV-targeting guide sequence portion
  source 1..20: mol_type = other RNA
gggactgcgaattttggcca

SEQ ID NO: 4158 - RNA, 20 nt, synthetic construct
  misc_feature 1..20: note = HBV-targeting guide sequence portion
  source 1..20: mol_type = other RNA
gggacttcaatcccaacaag

SEQ ID NO: 4159 - RNA, 20 nt, synthetic construct
  misc_feature 1..20: note = HBV-targeting guide sequence portion
  source 1..20: mol_type = other RNA
gggagaactaatgactctag

SEQ ID NO: 4160 - RNA, 20 nt, synthetic construct
  misc_feature 1..20: note = HBV-targeting guide sequence portion
  source 1..20: mol_type = other RNA
gggagaggacaacagagttg

SEQ ID NO: 4161 - RNA, 20 nt, synthetic construct
  misc_feature 1..20: note = HBV-targeting guide sequence portion
  source 1..20: mol_type = other RNA
gggagatacaggcctctcac

SEQ ID NO: 4162 - RNA, 20 nt, synthetic construct
  misc_feature 1..20: note = HBV-targeting guide sequence portion
  source 1..20: mol_type = other RNA
gggaggagattagattaatg

SEQ ID NO: 4163 - RNA, 20 nt, synthetic construct
  misc_feature 1..20: note = HBV-targeting guide sequence portion
  source 1..20: mol_type = other RNA
gggaggagttgggggaggag

SEQ ID NO: 4164 - RNA, 20 nt, synthetic construct
  misc_feature 1..20: note = HBV-targeting guide sequence portion
  source 1..20: mol_type = other RNA
gggagtccgcgtaaagagag

SEQ ID NO: 4165 - RNA, 20 nt, synthetic construct
  misc_feature 1..20: note = HBV-targeting guide sequence portion
  source 1..20: mol_type = other RNA
gggagtgggcctcagcccgt

SEQ ID NO: 4166 - RNA, 20 nt, synthetic construct
  misc_feature 1..20: note = HBV-targeting guide sequence portion
  source 1..20: mol_type = other RNA
gggagttcttcttctagggg

SEQ ID NO: 4167 - RNA, 20 nt, synthetic construct
  misc_feature 1..20: note = HBV-targeting guide sequence portion
  source 1..20: mol_type = other RNA
gggagttttctgaaacattc

SEQ ID NO: 4168 - RNA, 20 nt, synthetic construct
  misc_feature 1..20: note = HBV-targeting guide sequence portion
  source 1..20: mol_type = other RNA
gggatacatagaggttcctt

SEQ ID NO: 4169 - RNA, 20 nt, synthetic construct
  misc_feature 1..20: note = HBV-targeting guide sequence portion
  source 1..20: mol_type = other RNA
gggatactaacattgagatc

SEQ ID NO: 4170 - RNA, 20 nt, synthetic construct
  misc_feature 1..20: note = HBV-targeting guide sequence portion
  source 1..20: mol_type = other RNA
gggatcattgccacaaaatc

SEQ ID NO: 4171 - RNA, 20 nt, synthetic construct
  misc_feature 1..20: note = HBV-targeting guide sequence portion
  source 1..20: mol_type = other RNA
gggatccttgttgggattga

SEQ ID NO: 4172 - RNA, 20 nt, synthetic construct
  misc_feature 1..20: note = HBV-targeting guide sequence portion
  source 1..20: mol_type = other RNA
gggatctcaatgttagtatc

SEQ ID NO: 4173 - RNA, 20 nt, synthetic construct
  misc_feature 1..20: note = HBV-targeting guide sequence portion
  source 1..20: mol_type = other RNA
gggatcttgcagagtttggt

SEQ ID NO: 4174 - RNA, 20 nt, synthetic construct
  misc_feature 1..20: note = HBV-targeting guide sequence portion
  source 1..20: mol_type = other RNA
gggatgccttggagtctcct

SEQ ID NO: 4175 - RNA, 20 nt, synthetic construct
  misc_feature 1..20: note = HBV-targeting guide sequence portion
  source 1..20: mol_type = other RNA
gggatgggaatacaggtgca

SEQ ID NO: 4176 - RNA, 20 nt, synthetic construct
  misc_feature 1..20: note = HBV-targeting guide sequence portion
  source 1..20: mol_type = other RNA
gggattcagcgccgacggga

SEQ ID NO: 4177 - RNA, 20 nt, synthetic construct
  misc_feature 1..20: note = HBV-targeting guide sequence portion
  source 1..20: mol_type = other RNA
gggattctttcccgaccacc

SEQ ID NO: 4178 - RNA, 20 nt, synthetic construct
  misc_feature 1..20: note = HBV-targeting guide sequence portion
  source 1..20: mol_type = other RNA
gggattgaagtcccaatctg

SEQ ID NO: 4179 - RNA, 20 nt, synthetic construct
  misc_feature 1..20: note = HBV-targeting guide sequence portion
  source 1..20: mol_type = other RNA
gggcaagaattggtgggcgt

SEQ ID NO: 4180 - RNA, 20 nt, synthetic construct
  misc_feature 1..20: note = HBV-targeting guide sequence portion
  source 1..20: mol_type = other RNA
gggcaagtatttggtgaatt

SEQ ID NO: 4181 - RNA, 20 nt, synthetic construct
  misc_feature 1..20: note = HBV-targeting guide sequence portion
  source 1..20: mol_type = other RNA
gggcagaatctttccaccag

SEQ ID NO: 4182 - RNA, 20 nt, synthetic construct
  misc_feature 1..20: note = HBV-targeting guide sequence portion
  source 1..20: mol_type = other RNA
gggcagcaaaacccagaaga

SEQ ID NO: 4183 - RNA, 20 nt, synthetic construct
  misc_feature 1..20: note = HBV-targeting guide sequence portion
  source 1..20: mol_type = other RNA
gggcataatgcaaaccttgc

SEQ ID NO: 4184 - RNA, 20 nt, synthetic construct
  misc_feature 1..20: note = HBV-targeting guide sequence portion
  source 1..20: mol_type = other RNA
gggcatggacattgacccat

SEQ ID NO: 4185 - RNA, 20 nt, synthetic construct
  misc_feature 1..20: note = HBV-targeting guide sequence portion
  source 1..20: mol_type = other RNA
gggcattaaagcaggataac

SEQ ID NO: 4186 - RNA, 20 nt, synthetic construct
  misc_feature 1..20: note = HBV-targeting guide sequence portion
  source 1..20: mol_type = other RNA
gggcatttggtggtctataa

SEQ ID NO: 4187 - RNA, 20 nt, synthetic construct
  misc_feature 1..20: note = HBV-targeting guide sequence portion
  source 1..20: mol_type = other RNA
gggccaagtctgtacagcat

SEQ ID NO: 4188 - RNA, 20 nt, synthetic construct
  misc_feature 1..20: note = HBV-targeting guide sequence portion
  source 1..20: mol_type = other RNA
gggccccaagcggcctcgag

SEQ ID NO: 4189 - RNA, 20 nt, synthetic construct
  misc_feature 1..20: note = HBV-targeting guide sequence portion
  source 1..20: mol_type = other RNA
gggccctgtcgtcctcttct

SEQ ID NO: 4190 - RNA, 20 nt, synthetic construct
  misc_feature 1..20: note = HBV-targeting guide sequence portion
  source 1..20: mol_type = other RNA
gggcctaaagttcagacaac

SEQ ID NO: 4191 - RNA, 20 nt, synthetic construct
  misc_feature 1..20: note = HBV-targeting guide sequence portion
  source 1..20: mol_type = other RNA
gggcctacaaactgttcaca

SEQ ID NO: 4192 - RNA, 20 nt, synthetic construct
  misc_feature 1..20: note = HBV-targeting guide sequence portion
  source 1..20: mol_type = other RNA
gggcctcagcccgtttctct

SEQ ID NO: 4193 - RNA, 20 nt, synthetic construct
  misc_feature 1..20: note = HBV-targeting guide sequence portion
  source 1..20: mol_type = other RNA
gggcgcacctctctttacgc

SEQ ID NO: 4194 - RNA, 20 nt, synthetic construct
  misc_feature 1..20: note = HBV-targeting guide sequence portion
  source 1..20: mol_type = other RNA
gggcgttcacggtggtctcc

SEQ ID NO: 4195 - RNA, 20 nt, synthetic construct
  misc_feature 1..20: note = HBV-targeting guide sequence portion
  source 1..20: mol_type = other RNA
gggctagggttcaccccacc

SEQ ID NO: 4196 - RNA, 20 nt, synthetic construct
  misc_feature 1..20: note = HBV-targeting guide sequence portion
  source 1..20: mol_type = other RNA
gggctatgtcattgattgtt

SEQ ID NO: 4197 - RNA, 20 nt, synthetic construct
  misc_feature 1..20: note = HBV-targeting guide sequence portion
  source 1..20: mol_type = other RNA
gggctccaccccaaaaggcc

SEQ ID NO: 4198 - RNA, 20 nt, synthetic construct
  misc_feature 1..20: note = HBV-targeting guide sequence portion
  source 1..20: mol_type = other RNA
gggctgaggcccactcccat

SEQ ID NO: 4199 - RNA, 20 nt, synthetic construct
  misc_feature 1..20: note = HBV-targeting guide sequence portion
  source 1..20: mol_type = other RNA
gggcttggtcataggccatc

SEQ ID NO: 4200 - RNA, 20 nt, synthetic construct
  misc_feature 1..20: note = HBV-targeting guide sequence portion
  source 1..20: mol_type = other RNA
gggctttattcttctactgt

SEQ ID NO: 4201 - RNA, 20 nt, synthetic construct
  misc_feature 1..20: note = HBV-targeting guide sequence portion
  source 1..20: mol_type = other RNA
gggctttcccccactgtttg

SEQ ID NO: 4202 - RNA, 20 nt, synthetic construct
  misc_feature 1..20: note = HBV-targeting guide sequence portion
  source 1..20: mol_type = other RNA
gggctttcggaaaattccta

SEQ ID NO: 4203 - RNA, 20 nt, synthetic construct
  misc_feature 1..20: note = HBV-targeting guide sequence portion
  source 1..20: mol_type = other RNA
ggggaaagccctacgaacca

SEQ ID NO: 4204 - RNA, 20 nt, synthetic construct
  misc_feature 1..20: note = HBV-targeting guide sequence portion
  source 1..20: mol_type = other RNA
ggggaactaccgtgtgtctt

SEQ ID NO: 4205 - RNA, 20 nt, synthetic construct
  misc_feature 1..20: note = HBV-targeting guide sequence portion
  source 1..20: mol_type = other RNA
ggggaccctgcgctgaacat

SEQ ID NO: 4206 - RNA, 20 nt, synthetic construct
  misc_feature 1..20: note = HBV-targeting guide sequence portion
  source 1..20: mol_type = other RNA
ggggacctgcctcgtcgtct

SEQ ID NO: 4207 - RNA, 20 nt, synthetic construct
  misc_feature 1..20: note = HBV-targeting guide sequence portion
  source 1..20: mol_type = other RNA
ggggactgcgaattttggcc

SEQ ID NO: 4208 - RNA, 20 nt, synthetic construct
  misc_feature 1..20: note = HBV-targeting guide sequence portion
  source 1..20: mol_type = other RNA
ggggagaactaatgactcta

SEQ ID NO: 4209 - RNA, 20 nt, synthetic construct
  misc_feature 1..20: note = HBV-targeting guide sequence portion
  source 1..20: mol_type = other RNA
ggggaggagattagattaat

SEQ ID NO: 4210 - RNA, 20 nt, synthetic construct
  misc_feature 1..20: note = HBV-targeting guide sequence portion
  source 1..20: mol_type = other RNA
ggggagtccgcgtaaagaga

SEQ ID NO: 4211 - RNA, 20 nt, synthetic construct
  misc_feature 1..20: note = HBV-targeting guide sequence portion
  source 1..20: mol_type = other RNA
ggggatcattgccacaaaat

SEQ ID NO: 4212 - RNA, 20 nt, synthetic construct
  misc_feature 1..20: note = HBV-targeting guide sequence portion
  source 1..20: mol_type = other RNA
ggggatctcaatgttagtat

SEQ ID NO: 4213 - RNA, 20 nt, synthetic construct
  misc_feature 1..20: note = HBV-targeting guide sequence portion
  source 1..20: mol_type = other RNA
ggggcagaatctttccacca

SEQ ID NO: 4214 - RNA, 20 nt, synthetic construct
  misc_feature 1..20: note = HBV-targeting guide sequence portion
  source 1..20: mol_type = other RNA
ggggcagcaaaacccagaag

SEQ ID NO: 4215 - RNA, 20 nt, synthetic construct
  misc_feature 1..20: note = HBV-targeting guide sequence portion
  source 1..20: mol_type = other RNA
ggggcatttggtggtctata

SEQ ID NO: 4216 - RNA, 20 nt, synthetic construct
  misc_feature 1..20: note = HBV-targeting guide sequence portion
  source 1..20: mol_type = other RNA
ggggccaagtctgtacagca

SEQ ID NO: 4217 - RNA, 20 nt, synthetic construct
  misc_feature 1..20: note = HBV-targeting guide sequence portion
  source 1..20: mol_type = other RNA
ggggccctgtcgtcctcttc

SEQ ID NO: 4218 - RNA, 20 nt, synthetic construct
  misc_feature 1..20: note = HBV-targeting guide sequence portion
  source 1..20: mol_type = other RNA
ggggcgcacctctctttacg

SEQ ID NO: 4219 - RNA, 20 nt, synthetic construct
  misc_feature 1..20: note = HBV-targeting guide sequence portion
  source 1..20: mol_type = other RNA
ggggcttggtcataggccat

SEQ ID NO: 4220 - RNA, 20 nt, synthetic construct
  misc_feature 1..20: note = HBV-targeting guide sequence portion
  source 1..20: mol_type = other RNA
ggggctttattcttctactg

SEQ ID NO: 4221 - RNA, 20 nt, synthetic construct
  misc_feature 1..20: note = HBV-targeting guide sequence portion
  source 1..20: mol_type = other RNA
gggggaaagccctacgaacc

SEQ ID NO: 4222 - RNA, 20 nt, synthetic construct
  misc_feature 1..20: note = HBV-targeting guide sequence portion
  source 1..20: mol_type = other RNA
gggggaactaccgtgtgtct

SEQ ID NO: 4223 - RNA, 20 nt, synthetic construct
  misc_feature 1..20: note = HBV-targeting guide sequence portion
  source 1..20: mol_type = other RNA
gggggaggagattagattaa

SEQ ID NO: 4224 - RNA, 20 nt, synthetic construct
  misc_feature 1..20: note = HBV-targeting guide sequence portion
  source 1..20: mol_type = other RNA
gggggccaagtctgtacagc

SEQ ID NO: 4225 - RNA, 20 nt, synthetic construct
  misc_feature 1..20: note = HBV-targeting guide sequence portion
  source 1..20: mol_type = other RNA
gggggttgcatcagcaaaca

SEQ ID NO: 4226 - RNA, 20 nt, synthetic construct
  misc_feature 1..20: note = HBV-targeting guide sequence portion
  source 1..20: mol_type = other RNA
ggggtaaaggttcaggtatt

SEQ ID NO: 4227 - RNA, 20 nt, synthetic construct
  misc_feature 1..20: note = HBV-targeting guide sequence portion
  source 1..20: mol_type = other RNA
ggggtaggctgccgtcctga

SEQ ID NO: 4228 - RNA, 20 nt, synthetic construct
  misc_feature 1..20: note = HBV-targeting guide sequence portion
  source 1..20: mol_type = other RNA
ggggtcctaggaatcctgat

SEQ ID NO: 4229 - RNA, 20 nt, synthetic construct
  misc_feature 1..20: note = HBV-targeting guide sequence portion
  source 1..20: mol_type = other RNA
ggggtgaaccctagcccgaa

SEQ ID NO: 4230 - RNA, 20 nt, synthetic construct
  misc_feature 1..20: note = HBV-targeting guide sequence portion
  source 1..20: mol_type = other RNA
ggggtggagccctcaggctc

SEQ ID NO: 4231 - RNA, 20 nt, synthetic construct
  misc_feature 1..20: note = HBV-targeting guide sequence portion
  source 1..20: mol_type = other RNA
ggggttattctcttaatttc

SEQ ID NO: 4232 - RNA, 20 nt, synthetic construct
  misc_feature 1..20: note = HBV-targeting guide sequence portion
  source 1..20: mol_type = other RNA
ggggttgcatcagcaaacac

SEQ ID NO: 4233 - RNA, 20 nt, synthetic construct
  misc_feature 1..20: note = HBV-targeting guide sequence portion
  source 1..20: mol_type = other RNA
ggggttttccttgttgacaa

SEQ ID NO: 4234 - RNA, 20 nt, synthetic construct
  misc_feature 1..20: note = HBV-targeting guide sequence portion
  source 1..20: mol_type = other RNA
gggtaaaggttcaggtattg

SEQ ID NO: 4235 - RNA, 20 nt, synthetic construct
  misc_feature 1..20: note = HBV-targeting guide sequence portion
  source 1..20: mol_type = other RNA
gggtactaatttagaagatc

SEQ ID NO: 4236 - RNA, 20 nt, synthetic construct
  misc_feature 1..20: note = HBV-targeting guide sequence portion
  source 1..20: mol_type = other RNA
gggtaggctgccgtcctgac

SEQ ID NO: 4237 - RNA, 20 nt, synthetic construct
  misc_feature 1..20: note = HBV-targeting guide sequence portion
  source 1..20: mol_type = other RNA
gggtattaaaccttattatc

SEQ ID NO: 4238 - RNA, 20 nt, synthetic construct
  misc_feature 1..20: note = HBV-targeting guide sequence portion
  source 1..20: mol_type = other RNA
gggtcaatgtccatgcccta

SEQ ID NO: 4239 - RNA, 20 nt, synthetic construct
  misc_feature 1..20: note = HBV-targeting guide sequence portion
  source 1..20: mol_type = other RNA
gggtcaccatattcttggga

SEQ ID NO: 4240 - RNA, 20 nt, synthetic construct
  misc_feature 1..20: note = HBV-targeting guide sequence portion
  source 1..20: mol_type = other RNA
gggtccaactggtggtcggg

SEQ ID NO: 4241 - RNA, 20 nt, synthetic construct
  misc_feature 1..20: note = HBV-targeting guide sequence portion
  source 1..20: mol_type = other RNA
gggtccccaatcctcgagaa

SEQ ID NO: 4242 - RNA, 20 nt, synthetic construct
  misc_feature 1..20: note = HBV-targeting guide sequence portion
  source 1..20: mol_type = other RNA
gggtcccgtgctggtggttg

SEQ ID NO: 4243 - RNA, 20 nt, synthetic construct
  misc_feature 1..20: note = HBV-targeting guide sequence portion
  source 1..20: mol_type = other RNA
gggtcctaggaatcctgatg

SEQ ID NO: 4244 - RNA, 20 nt, synthetic construct
  misc_feature 1..20: note = HBV-targeting guide sequence portion
  source 1..20: mol_type = other RNA
gggtcgtccgcgggattcag

SEQ ID NO: 4245 - RNA, 20 nt, synthetic construct
  misc_feature 1..20: note = HBV-targeting guide sequence portion
  source 1..20: mol_type = other RNA
gggtcttctgggttttgctg

SEQ ID NO: 4246 - RNA, 20 nt, synthetic construct
  misc_feature 1..20: note = HBV-targeting guide sequence portion
  source 1..20: mol_type = other RNA
gggtgaaccctagcccgaat

SEQ ID NO: 4247 - RNA, 20 nt, synthetic construct
  misc_feature 1..20: note = HBV-targeting guide sequence portion
  source 1..20: mol_type = other RNA
gggtggagccctcaggctca

SEQ ID NO: 4248 - RNA, 20 nt, synthetic construct
  misc_feature 1..20: note = HBV-targeting guide sequence portion
  source 1..20: mol_type = other RNA
gggtggctttagggcatgga

SEQ ID NO: 4249 - RNA, 20 nt, synthetic construct
  misc_feature 1..20: note = HBV-targeting guide sequence portion
  source 1..20: mol_type = other RNA
gggtgggtactaatttagaa

SEQ ID NO: 4250 - RNA, 20 nt, synthetic construct
  misc_feature 1..20: note = HBV-targeting guide sequence portion
  source 1..20: mol_type = other RNA
gggtgtacatttaaacccta

SEQ ID NO: 4251 - RNA, 20 nt, synthetic construct
  misc_feature 1..20: note = HBV-targeting guide sequence portion
  source 1..20: mol_type = other RNA
gggtgttttatataagagag

SEQ ID NO: 4252 - RNA, 20 nt, synthetic construct
  misc_feature 1..20: note = HBV-targeting guide sequence portion
  source 1..20: mol_type = other RNA
gggtgttttccaatgagggt

SEQ ID NO: 4253 - RNA, 20 nt, synthetic construct
  misc_feature 1..20: note = HBV-targeting guide sequence portion
  source 1..20: mol_type = other RNA
gggttaaagacaggtacagt

SEQ ID NO: 4254 - RNA, 20 nt, synthetic construct
  misc_feature 1..20: note = HBV-targeting guide sequence portion
  source 1..20: mol_type = other RNA
gggttattctcttaatttca

SEQ ID NO: 4255 - RNA, 20 nt, synthetic construct
  misc_feature 1..20: note = HBV-targeting guide sequence portion
  source 1..20: mol_type = other RNA
gggttcaccccaccgcacgg

SEQ ID NO: 4256 - RNA, 20 nt, synthetic construct
  misc_feature 1..20: note = HBV-targeting guide sequence portion
  source 1..20: mol_type = other RNA
gggttgcatcagcaaacact

SEQ ID NO: 4257 - RNA, 20 nt, synthetic construct
  misc_feature 1..20: note = HBV-targeting guide sequence portion
  source 1..20: mol_type = other RNA
gggtttaaatgtacacccaa

SEQ ID NO: 4258 - RNA, 20 nt, synthetic construct
  misc_feature 1..20: note = HBV-targeting guide sequence portion
  source 1..20: mol_type = other RNA
gggtttactgttcctgaact

SEQ ID NO: 4259 - RNA, 20 nt, synthetic construct
  misc_feature 1..20: note = HBV-targeting guide sequence portion
  source 1..20: mol_type = other RNA
gggttttccttgttgacaag

SEQ ID NO: 4260 - RNA, 20 nt, synthetic construct
  misc_feature 1..20: note = HBV-targeting guide sequence portion
  source 1..20: mol_type = other RNA
gggttttgctgcccctttta

SEQ ID NO: 4261 - RNA, 20 nt, synthetic construct
  misc_feature 1..20: note = HBV-targeting guide sequence portion
  source 1..20: mol_type = other RNA
ggtaaaggttcaggtattgt

SEQ ID NO: 4262 - RNA, 20 nt, synthetic construct
  misc_feature 1..20: note = HBV-targeting guide sequence portion
  source 1..20: mol_type = other RNA
ggtaacagcggtataaaggg

SEQ ID NO: 4263 - RNA, 20 nt, synthetic construct
  misc_feature 1..20: note = HBV-targeting guide sequence portion
  source 1..20: mol_type = other RNA
ggtacagtagaagaataaag

SEQ ID NO: 4264 - RNA, 20 nt, synthetic construct
  misc_feature 1..20: note = HBV-targeting guide sequence portion
  source 1..20: mol_type = other RNA
ggtactaatttagaagatca

SEQ ID NO: 4265 - RNA, 20 nt, synthetic construct
  misc_feature 1..20: note = HBV-targeting guide sequence portion
  source 1..20: mol_type = other RNA
ggtagaggcaggaggcggat

SEQ ID NO: 4266 - RNA, 20 nt, synthetic construct
  misc_feature 1..20: note = HBV-targeting guide sequence portion
  source 1..20: mol_type = other RNA
ggtagctagagtcattagtt

SEQ ID NO: 4267 - RNA, 20 nt, synthetic construct
  misc_feature 1..20: note = HBV-targeting guide sequence portion
  source 1..20: mol_type = other RNA
ggtaggagctggagcattcg

SEQ ID NO: 4268 - RNA, 20 nt, synthetic construct
  misc_feature 1..20: note = HBV-targeting guide sequence portion
  source 1..20: mol_type = other RNA
ggtaggctgccgtcctgact

SEQ ID NO: 4269 - RNA, 20 nt, synthetic construct
  misc_feature 1..20: note = HBV-targeting guide sequence portion
  source 1..20: mol_type = other RNA
ggtagttccccctagaaaat

SEQ ID NO: 4270 - RNA, 20 nt, synthetic construct
  misc_feature 1..20: note = HBV-targeting guide sequence portion
  source 1..20: mol_type = other RNA
ggtataaagggactcaagat

SEQ ID NO: 4271 - RNA, 20 nt, synthetic construct
  misc_feature 1..20: note = HBV-targeting guide sequence portion
  source 1..20: mol_type = other RNA
ggtatctagaagatctcgta

SEQ ID NO: 4272 - RNA, 20 nt, synthetic construct
  misc_feature 1..20: note = HBV-targeting guide sequence portion
  source 1..20: mol_type = other RNA
ggtatgtttcccgtctgtcc

SEQ ID NO: 4273 - RNA, 20 nt, synthetic construct
  misc_feature 1..20: note = HBV-targeting guide sequence portion
  source 1..20: mol_type = other RNA
ggtattaaaccttattatcc

SEQ ID NO: 4274 - RNA, 20 nt, synthetic construct
  misc_feature 1..20: note = HBV-targeting guide sequence portion
  source 1..20: mol_type = other RNA
ggtattgggggccaagtctg

SEQ ID NO: 4275 - RNA, 20 nt, synthetic construct
  misc_feature 1..20: note = HBV-targeting guide sequence portion
  source 1..20: mol_type = other RNA
ggtattgtgaggattcttgt

SEQ ID NO: 4276 - RNA, 20 nt, synthetic construct
  misc_feature 1..20: note = HBV-targeting guide sequence portion
  source 1..20: mol_type = other RNA
ggtattgtttacacagaaag

SEQ ID NO: 4277 - RNA, 20 nt, synthetic construct
  misc_feature 1..20: note = HBV-targeting guide sequence portion
  source 1..20: mol_type = other RNA
ggtcaatgtccatgccctaa

SEQ ID NO: 4278 - RNA, 20 nt, synthetic construct
  misc_feature 1..20: note = HBV-targeting guide sequence portion
  source 1..20: mol_type = other RNA
ggtcaccatattcttgggaa

SEQ ID NO: 4279 - RNA, 20 nt, synthetic construct
  misc_feature 1..20: note = HBV-targeting guide sequence portion
  source 1..20: mol_type = other RNA
ggtcataggccatcagcgca

SEQ ID NO: 4280 - RNA, 20 nt, synthetic construct
  misc_feature 1..20: note = HBV-targeting guide sequence portion
  source 1..20: mol_type = other RNA
ggtccaactggtggtcggga

SEQ ID NO: 4281 - RNA, 20 nt, synthetic construct
  misc_feature 1..20: note = HBV-targeting guide sequence portion
  source 1..20: mol_type = other RNA
ggtccccaatcctcgagaag

SEQ ID NO: 4282 - RNA, 20 nt, synthetic construct
  misc_feature 1..20: note = HBV-targeting guide sequence portion
  source 1..20: mol_type = other RNA
ggtcccctagaagaagaact

SEQ ID NO: 4283 - RNA, 20 nt, synthetic construct
  misc_feature 1..20: note = HBV-targeting guide sequence portion
  source 1..20: mol_type = other RNA
ggtcccgtgctggtggttga

SEQ ID NO: 4284 - RNA, 20 nt, synthetic construct
  misc_feature 1..20: note = HBV-targeting guide sequence portion
  source 1..20: mol_type = other RNA
ggtccctagatgcttgatct

SEQ ID NO: 4285 - RNA, 20 nt, synthetic construct
  misc_feature 1..20: note = HBV-targeting guide sequence portion
  source 1..20: mol_type = other RNA
ggtccggcagatgagaaggc

SEQ ID NO: 4286 - RNA, 20 nt, synthetic construct
  misc_feature 1..20: note = HBV-targeting guide sequence portion
  source 1..20: mol_type = other RNA
ggtcctagagtatttggtgt

SEQ ID NO: 4287 - RNA, 20 nt, synthetic construct
  misc_feature 1..20: note = HBV-targeting guide sequence portion
  source 1..20: mol_type = other RNA
ggtcctaggaatcctgatgt

SEQ ID NO: 4288 - RNA, 20 nt, synthetic construct
  misc_feature 1..20: note = HBV-targeting guide sequence portion
  source 1..20: mol_type = other RNA
ggtcggaacggcaggcagag

SEQ ID NO: 4289 - RNA, 20 nt, synthetic construct
  misc_feature 1..20: note = HBV-targeting guide sequence portion
  source 1..20: mol_type = other RNA
ggtcgggaaagaatcccaga

SEQ ID NO: 4290 - RNA, 20 nt, synthetic construct
  misc_feature 1..20: note = HBV-targeting guide sequence portion
  source 1..20: mol_type = other RNA
ggtcggtcggaacggcaggc

SEQ ID NO: 4291 - RNA, 20 nt, synthetic construct
  misc_feature 1..20: note = HBV-targeting guide sequence portion
  source 1..20: mol_type = other RNA
ggtcggtcgttgacattgca

SEQ ID NO: 4292 - RNA, 20 nt, synthetic construct
  misc_feature 1..20: note = HBV-targeting guide sequence portion
  source 1..20: mol_type = other RNA
ggtcgtccgcgggattcagc

SEQ ID NO: 4293 - RNA, 20 nt, synthetic construct
  misc_feature 1..20: note = HBV-targeting guide sequence portion
  source 1..20: mol_type = other RNA
ggtcgttgacattgcagaga

SEQ ID NO: 4294 - RNA, 20 nt, synthetic construct
  misc_feature 1..20: note = HBV-targeting guide sequence portion
  source 1..20: mol_type = other RNA
ggtctataagctggaggagt

SEQ ID NO: 4295 - RNA, 20 nt, synthetic construct
  misc_feature 1..20: note = HBV-targeting guide sequence portion
  source 1..20: mol_type = other RNA
ggtctccatgcgacgtgcag

SEQ ID NO: 4296 - RNA, 20 nt, synthetic construct
  misc_feature 1..20: note = HBV-targeting guide sequence portion
  source 1..20: mol_type = other RNA
ggtctgcgcaccagcaccat

SEQ ID NO: 4297 - RNA, 20 nt, synthetic construct
  misc_feature 1..20: note = HBV-targeting guide sequence portion
  source 1..20: mol_type = other RNA
ggtctggagcaaacattctc

SEQ ID NO: 4298 - RNA, 20 nt, synthetic construct
  misc_feature 1..20: note = HBV-targeting guide sequence portion
  source 1..20: mol_type = other RNA
ggtctgtgccaagtgtttgc

SEQ ID NO: 4299 - RNA, 20 nt, synthetic construct
  misc_feature 1..20: note = HBV-targeting guide sequence portion
  source 1..20: mol_type = other RNA
ggtcttacataagaggactc

SEQ ID NO: 4300 - RNA, 20 nt, synthetic construct
  misc_feature 1..20: note = HBV-targeting guide sequence portion
  source 1..20: mol_type = other RNA
ggtcttctgggttttgctgc

SEQ ID NO: 4301 - RNA, 20 nt, synthetic construct
  misc_feature 1..20: note = HBV-targeting guide sequence portion
  source 1..20: mol_type = other RNA
ggtgaaaaagttgcatggtg

SEQ ID NO: 4302 - RNA, 20 nt, synthetic construct
  misc_feature 1..20: note = HBV-targeting guide sequence portion
  source 1..20: mol_type = other RNA
ggtgaacaatgctcaggaga

SEQ ID NO: 4303 - RNA, 20 nt, synthetic construct
  misc_feature 1..20: note = HBV-targeting guide sequence portion
  source 1..20: mol_type = other RNA
ggtgaaccctagcccgaatg

SEQ ID NO: 4304 - RNA, 20 nt, synthetic construct
  misc_feature 1..20: note = HBV-targeting guide sequence portion
  source 1..20: mol_type = other RNA
ggtgaagcgaagtgcacacg

SEQ ID NO: 4305 - RNA, 20 nt, synthetic construct
  misc_feature 1..20: note = HBV-targeting guide sequence portion
  source 1..20: mol_type = other RNA
ggtgaatttaggataaaacc

SEQ ID NO: 4306 - RNA, 20 nt, synthetic construct
  misc_feature 1..20: note = HBV-targeting guide sequence portion
  source 1..20: mol_type = other RNA
ggtgacccacagaatgaggc

SEQ ID NO: 4307 - RNA, 20 nt, synthetic construct
  misc_feature 1..20: note = HBV-targeting guide sequence portion
  source 1..20: mol_type = other RNA
ggtgaggtgaacaatgctca

SEQ ID NO: 4308 - RNA, 20 nt, synthetic construct
  misc_feature 1..20: note = HBV-targeting guide sequence portion
  source 1..20: mol_type = other RNA
ggtgagtgattggaggttgg

SEQ ID NO: 4309 - RNA, 20 nt, synthetic construct
  misc_feature 1..20: note = HBV-targeting guide sequence portion
  source 1..20: mol_type = other RNA
ggtgcagtttccatccgaag

SEQ ID NO: 4310 - RNA, 20 nt, synthetic construct
  misc_feature 1..20: note = HBV-targeting guide sequence portion
  source 1..20: mol_type = other RNA
ggtgcgcagaccaatttatg

SEQ ID NO: 4311 - RNA, 20 nt, synthetic construct
  misc_feature 1..20: note = HBV-targeting guide sequence portion
  source 1..20: mol_type = other RNA
ggtgcgccccgtggtcggtc

SEQ ID NO: 4312 - RNA, 20 nt, synthetic construct
  misc_feature 1..20: note = HBV-targeting guide sequence portion
  source 1..20: mol_type = other RNA
ggtgctggtgcgcagaccaa

SEQ ID NO: 4313 - RNA, 20 nt, synthetic construct
  misc_feature 1..20: note = HBV-targeting guide sequence portion
  source 1..20: mol_type = other RNA
ggtggaaagattctgcccca

SEQ ID NO: 4314 - RNA, 20 nt, synthetic construct
  misc_feature 1..20: note = HBV-targeting guide sequence portion
  source 1..20: mol_type = other RNA
ggtggacttctctcaatttt

SEQ ID NO: 4315 - RNA, 20 nt, synthetic construct
  misc_feature 1..20: note = HBV-targeting guide sequence portion
  source 1..20: mol_type = other RNA
ggtggagacagcggggtagg

SEQ ID NO: 4316 - RNA, 20 nt, synthetic construct
  misc_feature 1..20: note = HBV-targeting guide sequence portion
  source 1..20: mol_type = other RNA
ggtggagccctcaggctcag

SEQ ID NO: 4317 - RNA, 20 nt, synthetic construct
  misc_feature 1..20: note = HBV-targeting guide sequence portion
  source 1..20: mol_type = other RNA
ggtggctccagttcaggaac

SEQ ID NO: 4318 - RNA, 20 nt, synthetic construct
  misc_feature 1..20: note = HBV-targeting guide sequence portion
  source 1..20: mol_type = other RNA
ggtggctttagggcatggac

SEQ ID NO: 4319 - RNA, 20 nt, synthetic construct
  misc_feature 1..20: note = HBV-targeting guide sequence portion
  source 1..20: mol_type = other RNA
ggtgggaaattttacggggc

SEQ ID NO: 4320 - RNA, 20 nt, synthetic construct
  misc_feature 1..20: note = HBV-targeting guide sequence portion
  source 1..20: mol_type = other RNA
ggtgggcgttcacggtggtc

SEQ ID NO: 4321 - RNA, 20 nt, synthetic construct
  misc_feature 1..20: note = HBV-targeting guide sequence portion
  source 1..20: mol_type = other RNA
ggtggggtgaaccctagccc

SEQ ID NO: 4322 - RNA, 20 nt, synthetic construct
  misc_feature 1..20: note = HBV-targeting guide sequence portion
  source 1..20: mol_type = other RNA
ggtgggtactaatttagaag

SEQ ID NO: 4323 - RNA, 20 nt, synthetic construct
  misc_feature 1..20: note = HBV-targeting guide sequence portion
  source 1..20: mol_type = other RNA
ggtggtcgggaaagaatccc

SEQ ID NO: 4324 - RNA, 20 nt, synthetic construct
  misc_feature 1..20: note = HBV-targeting guide sequence portion
  source 1..20: mol_type = other RNA
ggtggtctataagctggagg

SEQ ID NO: 4325 - RNA, 20 nt, synthetic construct
  misc_feature 1..20: note = HBV-targeting guide sequence portion
  source 1..20: mol_type = other RNA
ggtggtctccatgcgacgtg

SEQ ID NO: 4326 - RNA, 20 nt, synthetic construct
  misc_feature 1..20: note = HBV-targeting guide sequence portion
  source 1..20: mol_type = other RNA
ggtggttgatgatcctggaa

SEQ ID NO: 4327 - RNA, 20 nt, synthetic construct
  misc_feature 1..20: note = HBV-targeting guide sequence portion
  source 1..20: mol_type = other RNA
ggtgtacatttaaaccctaa

SEQ ID NO: 4328 - RNA, 20 nt, synthetic construct
  misc_feature 1..20: note = HBV-targeting guide sequence portion
  source 1..20: mol_type = other RNA
ggtgtagatgtatattagga

SEQ ID NO: 4329 - RNA, 20 nt, synthetic construct
  misc_feature 1..20: note = HBV-targeting guide sequence portion
  source 1..20: mol_type = other RNA
ggtgtcttttggagtgtgga

SEQ ID NO: 4330 - RNA, 20 nt, synthetic construct
  misc_feature 1..20: note = HBV-targeting guide sequence portion
  source 1..20: mol_type = other RNA
ggtgttttatataagagagt

SEQ ID NO: 4331 - RNA, 20 nt, synthetic construct
  misc_feature 1..20: note = HBV-targeting guide sequence portion
  source 1..20: mol_type = other RNA
ggtgttttccaatgagggtt

SEQ ID NO: 4332 - RNA, 20 nt, synthetic construct
  misc_feature 1..20: note = HBV-targeting guide sequence portion
  source 1..20: mol_type = other RNA
ggttaaagacaggtacagta

SEQ ID NO: 4333 - RNA, 20 nt, synthetic construct
  misc_feature 1..20: note = HBV-targeting guide sequence portion
  source 1..20: mol_type = other RNA
ggttaacaggcctattgatt

SEQ ID NO: 4334 - RNA, 20 nt, synthetic construct
  misc_feature 1..20: note = HBV-targeting guide sequence portion
  source 1..20: mol_type = other RNA
ggttatcctgctttaatgcc

SEQ ID NO: 4335 - RNA, 20 nt, synthetic construct
  misc_feature 1..20: note = HBV-targeting guide sequence portion
  source 1..20: mol_type = other RNA
ggttatcgctggatgtgtct

SEQ ID NO: 4336 - RNA, 20 nt, synthetic construct
  misc_feature 1..20: note = HBV-targeting guide sequence portion
  source 1..20: mol_type = other RNA
ggttattctcttaatttcat

SEQ ID NO: 4337 - RNA, 20 nt, synthetic construct
  misc_feature 1..20: note = HBV-targeting guide sequence portion
  source 1..20: mol_type = other RNA
ggttcaccccaccgcacgga

SEQ ID NO: 4338 - RNA, 20 nt, synthetic construct
  misc_feature 1..20: note = HBV-targeting guide sequence portion
  source 1..20: mol_type = other RNA
ggttcaggtattgtttacac

SEQ ID NO: 4339 - RNA, 20 nt, synthetic construct
  misc_feature 1..20: note = HBV-targeting guide sequence portion
  source 1..20: mol_type = other RNA
ggttccacgcatgcgctgat

SEQ ID NO: 4340 - RNA, 20 nt, synthetic construct
  misc_feature 1..20: note = HBV-targeting guide sequence portion
  source 1..20: mol_type = other RNA
ggttccttgagcaggagtcg

SEQ ID NO: 4341 - RNA, 20 nt, synthetic construct
  misc_feature 1..20: note = HBV-targeting guide sequence portion
  source 1..20: mol_type = other RNA
ggttcgtagggctttccccc

SEQ ID NO: 4342 - RNA, 20 nt, synthetic construct
  misc_feature 1..20: note = HBV-targeting guide sequence portion
  source 1..20: mol_type = other RNA
ggttctgcagggtcccgtgc

SEQ ID NO: 4343 - RNA, 20 nt, synthetic construct
  misc_feature 1..20: note = HBV-targeting guide sequence portion
  source 1..20: mol_type = other RNA
ggttcttctggactatcaag

SEQ ID NO: 4344 - RNA, 20 nt, synthetic construct
  misc_feature 1..20: note = HBV-targeting guide sequence portion
  source 1..20: mol_type = other RNA
ggttgaaattgattatgcct

SEQ ID NO: 4345 - RNA, 20 nt, synthetic construct
  misc_feature 1..20: note = HBV-targeting guide sequence portion
  source 1..20: mol_type = other RNA
ggttgatgatcctggaatta

SEQ ID NO: 4346 - RNA, 20 nt, synthetic construct
  misc_feature 1..20: note = HBV-targeting guide sequence portion
  source 1..20: mol_type = other RNA
ggttgcatcagcaaacactt

SEQ ID NO: 4347 - RNA, 20 nt, synthetic construct
  misc_feature 1..20: note = HBV-targeting guide sequence portion
  source 1..20: mol_type = other RNA
ggttggggactgcgaatttt

SEQ ID NO: 4348 - RNA, 20 nt, synthetic construct
  misc_feature 1..20: note = HBV-targeting guide sequence portion
  source 1..20: mol_type = other RNA
ggttggggcttggtcatagg

SEQ ID NO: 4349 - RNA, 20 nt, synthetic construct
  misc_feature 1..20: note = HBV-targeting guide sequence portion
  source 1..20: mol_type = other RNA
ggttggtgagtgattggagg

SEQ ID NO: 4350 - RNA, 20 nt, synthetic construct
  misc_feature 1..20: note = HBV-targeting guide sequence portion
  source 1..20: mol_type = other RNA
ggtttaaatgtacacccaaa

SEQ ID NO: 4351 - RNA, 20 nt, synthetic construct
  misc_feature 1..20: note = HBV-targeting guide sequence portion
  source 1..20: mol_type = other RNA
ggtttaatacccttatccaa

SEQ ID NO: 4352 - RNA, 20 nt, synthetic construct
  misc_feature 1..20: note = HBV-targeting guide sequence portion
  source 1..20: mol_type = other RNA
ggtttactgttcctgaactg

SEQ ID NO: 4353 - RNA, 20 nt, synthetic construct
  misc_feature 1..20: note = HBV-targeting guide sequence portion
  source 1..20: mol_type = other RNA
ggtttcacatttcttgtctt

SEQ ID NO: 4354 - RNA, 20 nt, synthetic construct
  misc_feature 1..20: note = HBV-targeting guide sequence portion
  source 1..20: mol_type = other RNA
ggtttgcattatgccctgag

SEQ ID NO: 4355 - RNA, 20 nt, synthetic construct
  misc_feature 1..20: note = HBV-targeting guide sequence portion
  source 1..20: mol_type = other RNA
ggttttatcctaaattcacc

SEQ ID NO: 4356 - RNA, 20 nt, synthetic construct
  misc_feature 1..20: note = HBV-targeting guide sequence portion
  source 1..20: mol_type = other RNA
ggttttccttgttgacaaga

SEQ ID NO: 4357 - RNA, 20 nt, synthetic construct
  misc_feature 1..20: note = HBV-targeting guide sequence portion
  source 1..20: mol_type = other RNA
ggttttgctgccccttttac

SEQ ID NO: 4358 - RNA, 20 nt, synthetic construct
  misc_feature 1..20: note = HBV-targeting guide sequence portion
  source 1..20: mol_type = other RNA
ggttttgtacagcaacagga

SEQ ID NO: 4359 - RNA, 20 nt, synthetic construct
  misc_feature 1..20: note = HBV-targeting guide sequence portion
  source 1..20: mol_type = other RNA
gtaaaaggggcagcaaaacc

SEQ ID NO: 4360 - RNA, 20 nt, synthetic construct
  misc_feature 1..20: note = HBV-targeting guide sequence portion
  source 1..20: mol_type = other RNA
gtaaaatttcccaccttatg

SEQ ID NO: 4361 - RNA, 20 nt, synthetic construct
  misc_feature 1..20: note = HBV-targeting guide sequence portion
  source 1..20: mol_type = other RNA
gtaaacaaaggacgtcccgc

SEQ ID NO: 4362 - RNA, 20 nt, synthetic construct
  misc_feature 1..20: note = HBV-targeting guide sequence portion
  source 1..20: mol_type = other RNA
gtaaacaatacctgaacctt

SEQ ID NO: 4363 - RNA, 20 nt, synthetic construct
  misc_feature 1..20: note = HBV-targeting guide sequence portion
  source 1..20: mol_type = other RNA
gtaaaccctgttccgactac

SEQ ID NO: 4364 - RNA, 20 nt, synthetic construct
  misc_feature 1..20: note = HBV-targeting guide sequence portion
  source 1..20: mol_type = other RNA
gtaaactgagccaagagaaa

SEQ ID NO: 4365 - RNA, 20 nt, synthetic construct
  misc_feature 1..20: note = HBV-targeting guide sequence portion
  source 1..20: mol_type = other RNA
gtaaagagaggtgcgccccg

SEQ ID NO: 4366 - RNA, 20 nt, synthetic construct
  misc_feature 1..20: note = HBV-targeting guide sequence portion
  source 1..20: mol_type = other RNA
gtaaaggttcaggtattgtt

SEQ ID NO: 4367 - RNA, 20 nt, synthetic construct
  misc_feature 1..20: note = HBV-targeting guide sequence portion
  source 1..20: mol_type = other RNA
gtaaatagtgtctagtttgg

SEQ ID NO: 4368 - RNA, 20 nt, synthetic construct
  misc_feature 1..20: note = HBV-targeting guide sequence portion
  source 1..20: mol_type = other RNA
gtaacacgagcaggggtcct

SEQ ID NO: 4369 - RNA, 20 nt, synthetic construct
  misc_feature 1..20: note = HBV-targeting guide sequence portion
  source 1..20: mol_type = other RNA
gtaacagcggtataaaggga

SEQ ID NO: 4370 - RNA, 20 nt, synthetic construct
  misc_feature 1..20: note = HBV-targeting guide sequence portion
  source 1..20: mol_type = other RNA
gtaactccacagtagctcca

SEQ ID NO: 4371 - RNA, 20 nt, synthetic construct
  misc_feature 1..20: note = HBV-targeting guide sequence portion
  source 1..20: mol_type = other RNA
gtaagacaagaaatgtgaaa

SEQ ID NO: 4372 - RNA, 20 nt, synthetic construct
  misc_feature 1..20: note = HBV-targeting guide sequence portion
  source 1..20: mol_type = other RNA
gtaagaccttgggcaagaat

SEQ ID NO: 4373 - RNA, 20 nt, synthetic construct
  misc_feature 1..20: note = HBV-targeting guide sequence portion
  source 1..20: mol_type = other RNA
gtaagcgggcctacaaactg

SEQ ID NO: 4374 - RNA, 20 nt, synthetic construct
  misc_feature 1..20: note = HBV-targeting guide sequence portion
  source 1..20: mol_type = other RNA
gtaagttggcgaaaaagtga

SEQ ID NO: 4375 - RNA, 20 nt, synthetic construct
  misc_feature 1..20: note = HBV-targeting guide sequence portion
  source 1..20: mol_type = other RNA
gtaatgattaactagatgtt

SEQ ID NO: 4376 - RNA, 20 nt, synthetic construct
  misc_feature 1..20: note = HBV-targeting guide sequence portion
  source 1..20: mol_type = other RNA
gtacaaaaccttcggatgga

SEQ ID NO: 4377 - RNA, 20 nt, synthetic construct
  misc_feature 1..20: note = HBV-targeting guide sequence portion
  source 1..20: mol_type = other RNA
gtacaaagatcattaatcta

SEQ ID NO: 4378 - RNA, 20 nt, synthetic construct
  misc_feature 1..20: note = HBV-targeting guide sequence portion
  source 1..20: mol_type = other RNA
gtacacccaaagacaaaaga

SEQ ID NO: 4379 - RNA, 20 nt, synthetic construct
  misc_feature 1..20: note = HBV-targeting guide sequence portion
  source 1..20: mol_type = other RNA
gtacagacttggcccccaat

SEQ ID NO: 4380 - RNA, 20 nt, synthetic construct
  misc_feature 1..20: note = HBV-targeting guide sequence portion
  source 1..20: mol_type = other RNA
gtacagcaacaggagggata

SEQ ID NO: 4381 - RNA, 20 nt, synthetic construct
  misc_feature 1..20: note = HBV-targeting guide sequence portion
  source 1..20: mol_type = other RNA
gtacagcatcttgagtccct

SEQ ID NO: 4382 - RNA, 20 nt, synthetic construct
  misc_feature 1..20: note = HBV-targeting guide sequence portion
  source 1..20: mol_type = other RNA
gtacagtagaagaataaagc

SEQ ID NO: 4383 - RNA, 20 nt, synthetic construct
  misc_feature 1..20: note = HBV-targeting guide sequence portion
  source 1..20: mol_type = other RNA
gtacatttaaaccctaacaa

SEQ ID NO: 4384 - RNA, 20 nt, synthetic construct
  misc_feature 1..20: note = HBV-targeting guide sequence portion
  source 1..20: mol_type = other RNA
gtacccacccaggtagctag

SEQ ID NO: 4385 - RNA, 20 nt, synthetic construct
  misc_feature 1..20: note = HBV-targeting guide sequence portion
  source 1..20: mol_type = other RNA
gtacctgtctttaaccctca

SEQ ID NO: 4386 - RNA, 20 nt, synthetic construct
  misc_feature 1..20: note = HBV-targeting guide sequence portion
  source 1..20: mol_type = other RNA
gtacgagatcttctagatac

SEQ ID NO: 4387 - RNA, 20 nt, synthetic construct
  misc_feature 1..20: note = HBV-targeting guide sequence portion
  source 1..20: mol_type = other RNA
gtacggaaggaaagaagtca

SEQ ID NO: 4388 - RNA, 20 nt, synthetic construct
  misc_feature 1..20: note = HBV-targeting guide sequence portion
  source 1..20: mol_type = other RNA
gtactaatttagaagatcaa

SEQ ID NO: 4389 - RNA, 20 nt, synthetic construct
  misc_feature 1..20: note = HBV-targeting guide sequence portion
  source 1..20: mol_type = other RNA
gtactaggaggctgtaggca

SEQ ID NO: 4390 - RNA, 20 nt, synthetic construct
  misc_feature 1..20: note = HBV-targeting guide sequence portion
  source 1..20: mol_type = other RNA
gtagaagaataaagccccgt

SEQ ID NO: 4391 - RNA, 20 nt, synthetic construct
  misc_feature 1..20: note = HBV-targeting guide sequence portion
  source 1..20: mol_type = other RNA
gtagaggcaggaggcggatt

SEQ ID NO: 4392 - RNA, 20 nt, synthetic construct
  misc_feature 1..20: note = HBV-targeting guide sequence portion
  source 1..20: mol_type = other RNA
gtagatgtatattaggaaaa

SEQ ID NO: 4393 - RNA, 20 nt, synthetic construct
  misc_feature 1..20: note = HBV-targeting guide sequence portion
  source 1..20: mol_type = other RNA
gtagctagagtcattagttc

SEQ ID NO: 4394 - RNA, 20 nt, synthetic construct
  misc_feature 1..20: note = HBV-targeting guide sequence portion
  source 1..20: mol_type = other RNA
gtagctccaaattctttata

SEQ ID NO: 4395 - RNA, 20 nt, synthetic construct
  misc_feature 1..20: note = HBV-targeting guide sequence portion
  source 1..20: mol_type = other RNA
gtagctcttgttcccaagaa

SEQ ID NO: 4396 - RNA, 20 nt, synthetic construct
  misc_feature 1..20: note = HBV-targeting guide sequence portion
  source 1..20: mol_type = other RNA
gtaggacatgaacaagagat

SEQ ID NO: 4397 - RNA, 20 nt, synthetic construct
  misc_feature 1..20: note = HBV-targeting guide sequence portion
  source 1..20: mol_type = other RNA
gtaggagctggagcattcgg

SEQ ID NO: 4398 - RNA, 20 nt, synthetic construct
  misc_feature 1..20: note = HBV-targeting guide sequence portion
  source 1..20: mol_type = other RNA
gtaggcataaattggtctgc

SEQ ID NO: 4399 - RNA, 20 nt, synthetic construct
  misc_feature 1..20: note = HBV-targeting guide sequence portion
  source 1..20: mol_type = other RNA
gtaggcccgcttacagttaa

SEQ ID NO: 4400 - RNA, 20 nt, synthetic construct
  misc_feature 1..20: note = HBV-targeting guide sequence portion
  source 1..20: mol_type = other RNA
gtaggctgccgtcctgactg

SEQ ID NO: 4401 - RNA, 20 nt, synthetic construct
  misc_feature 1..20: note = HBV-targeting guide sequence portion
  source 1..20: mol_type = other RNA
gtagggctttcccccactgt

SEQ ID NO: 4402 - RNA, 20 nt, synthetic construct
  misc_feature 1..20: note = HBV-targeting guide sequence portion
  source 1..20: mol_type = other RNA
gtagtcagttatgtcaacac

SEQ ID NO: 4403 - RNA, 20 nt, synthetic construct
  misc_feature 1..20: note = HBV-targeting guide sequence portion
  source 1..20: mol_type = other RNA
gtagtcggaacagggtttac

SEQ ID NO: 4404 - RNA, 20 nt, synthetic construct
  misc_feature 1..20: note = HBV-targeting guide sequence portion
  source 1..20: mol_type = other RNA
gtagttccccctagaaaatt

SEQ ID NO: 4405 - RNA, 20 nt, synthetic construct
  misc_feature 1..20: note = HBV-targeting guide sequence portion
  source 1..20: mol_type = other RNA
gtataaagggactcaagatg

SEQ ID NO: 4406 - RNA, 20 nt, synthetic construct
  misc_feature 1..20: note = HBV-targeting guide sequence portion
  source 1..20: mol_type = other RNA
gtatattaggaaaagagggt

SEQ ID NO: 4407 - RNA, 20 nt, synthetic construct
  misc_feature 1..20: note = HBV-targeting guide sequence portion
  source 1..20: mol_type = other RNA
gtatatttgcgggagaggac

SEQ ID NO: 4408 - RNA, 20 nt, synthetic construct
  misc_feature 1..20: note = HBV-targeting guide sequence portion
  source 1..20: mol_type = other RNA
gtatccctcctgttgctgta

SEQ ID NO: 4409 - RNA, 20 nt, synthetic construct
  misc_feature 1..20: note = HBV-targeting guide sequence portion
  source 1..20: mol_type = other RNA
gtatcccttggactcataag

SEQ ID NO: 4410 - RNA, 20 nt, synthetic construct
  misc_feature 1..20: note = HBV-targeting guide sequence portion
  source 1..20: mol_type = other RNA
gtatcgggatgccttggagt

SEQ ID NO: 4411 - RNA, 20 nt, synthetic construct
  misc_feature 1..20: note = HBV-targeting guide sequence portion
  source 1..20: mol_type = other RNA
gtatctagaagatctcgtac

SEQ ID NO: 4412 - RNA, 20 nt, synthetic construct
  misc_feature 1..20: note = HBV-targeting guide sequence portion
  source 1..20: mol_type = other RNA
gtatctccctgctggtggct

SEQ ID NO: 4413 - RNA, 20 nt, synthetic construct
  misc_feature 1..20: note = HBV-targeting guide sequence portion
  source 1..20: mol_type = other RNA
gtatgatgtgattttgtggc

SEQ ID NO: 4414 - RNA, 20 nt, synthetic construct
  misc_feature 1..20: note = HBV-targeting guide sequence portion
  source 1..20: mol_type = other RNA
gtatgcatgtattcaatcta

SEQ ID NO: 4415 - RNA, 20 nt, synthetic construct
  misc_feature 1..20: note = HBV-targeting guide sequence portion
  source 1..20: mol_type = other RNA
gtatgcctcaaggtcggtcg

SEQ ID NO: 4416 - RNA, 20 nt, synthetic construct
  misc_feature 1..20: note = HBV-targeting guide sequence portion
  source 1..20: mol_type = other RNA
gtatggatcggcagaggagc

SEQ ID NO: 4417 - RNA, 20 nt, synthetic construct
  misc_feature 1..20: note = HBV-targeting guide sequence portion
  source 1..20: mol_type = other RNA
gtatggtgaggtgaacaatg

SEQ ID NO: 4418 - RNA, 20 nt, synthetic construct
  misc_feature 1..20: note = HBV-targeting guide sequence portion
  source 1..20: mol_type = other RNA
gtatgtttcccgtctgtcct

SEQ ID NO: 4419 - RNA, 20 nt, synthetic construct
  misc_feature 1..20: note = HBV-targeting guide sequence portion
  source 1..20: mol_type = other RNA
gtattaaaccttattatcca

SEQ ID NO: 4420 - RNA, 20 nt, synthetic construct
  misc_feature 1..20: note = HBV-targeting guide sequence portion
  source 1..20: mol_type = other RNA
gtattcaatctaagcaggct

SEQ ID NO: 4421 - RNA, 20 nt, synthetic construct
  misc_feature 1..20: note = HBV-targeting guide sequence portion
  source 1..20: mol_type = other RNA
gtattcccatcccatcatcc

SEQ ID NO: 4422 - RNA, 20 nt, synthetic construct
  misc_feature 1..20: note = HBV-targeting guide sequence portion
  source 1..20: mol_type = other RNA
gtattgggggccaagtctgt

SEQ ID NO: 4423 - RNA, 20 nt, synthetic construct
  misc_feature 1..20: note = HBV-targeting guide sequence portion
  source 1..20: mol_type = other RNA
gtattgtgaggattcttgtc

SEQ ID NO: 4424 - RNA, 20 nt, synthetic construct
  misc_feature 1..20: note = HBV-targeting guide sequence portion
  source 1..20: mol_type = other RNA
gtattgtttacacagaaagg

SEQ ID NO: 4425 - RNA, 20 nt, synthetic construct
  misc_feature 1..20: note = HBV-targeting guide sequence portion
  source 1..20: mol_type = other RNA
gtatttggtgaatttaggat

SEQ ID NO: 4426 - RNA, 20 nt, synthetic construct
  misc_feature 1..20: note = HBV-targeting guide sequence portion
  source 1..20: mol_type = other RNA
gtatttggtgtcttttggag

SEQ ID NO: 4427 - RNA, 20 nt, synthetic construct
  misc_feature 1..20: note = HBV-targeting guide sequence portion
  source 1..20: mol_type = other RNA
gtcaacaaggaaaaccccgc

SEQ ID NO: 4428 - RNA, 20 nt, synthetic construct
  misc_feature 1..20: note = HBV-targeting guide sequence portion
  source 1..20: mol_type = other RNA
gtcaacacatagcgcctcat

SEQ ID NO: 4429 - RNA, 20 nt, synthetic construct
  misc_feature 1..20: note = HBV-targeting guide sequence portion
  source 1..20: mol_type = other RNA
gtcaacactcatatgggcct

SEQ ID NO: 4430 - RNA, 20 nt, synthetic construct
  misc_feature 1..20: note = HBV-targeting guide sequence portion
  source 1..20: mol_type = other RNA
gtcaacgaattgtgggtctt

SEQ ID NO: 4431 - RNA, 20 nt, synthetic construct
  misc_feature 1..20: note = HBV-targeting guide sequence portion
  source 1..20: mol_type = other RNA
gtcaacgaccgaccttgagg

SEQ ID NO: 4432 - RNA, 20 nt, synthetic construct
  misc_feature 1..20: note = HBV-targeting guide sequence portion
  source 1..20: mol_type = other RNA
gtcaatcttctcgaggattg

SEQ ID NO: 4433 - RNA, 20 nt, synthetic construct
  misc_feature 1..20: note = HBV-targeting guide sequence portion
  source 1..20: mol_type = other RNA
gtcaatgtccatgccctaaa

SEQ ID NO: 4434 - RNA, 20 nt, synthetic construct
  misc_feature 1..20: note = HBV-targeting guide sequence portion
  source 1..20: mol_type = other RNA
gtcaccatattcttgggaac

SEQ ID NO: 4435 - RNA, 20 nt, synthetic construct
  misc_feature 1..20: note = HBV-targeting guide sequence portion
  source 1..20: mol_type = other RNA
gtcagaaggcaaaaacgaga

SEQ ID NO: 4436 - RNA, 20 nt, synthetic construct
  misc_feature 1..20: note = HBV-targeting guide sequence portion
  source 1..20: mol_type = other RNA
gtcaggacggcagcctaccc

SEQ ID NO: 4437 - RNA, 20 nt, synthetic construct
  misc_feature 1..20: note = HBV-targeting guide sequence portion
  source 1..20: mol_type = other RNA
gtcagtcccgagaatgtttg

SEQ ID NO: 4438 - RNA, 20 nt, synthetic construct
  misc_feature 1..20: note = HBV-targeting guide sequence portion
  source 1..20: mol_type = other RNA
gtcagttatgtcaacactca

SEQ ID NO: 4439 - RNA, 20 nt, synthetic construct
  misc_feature 1..20: note = HBV-targeting guide sequence portion
  source 1..20: mol_type = other RNA
gtcataggccatcagcgcat

SEQ ID NO: 4440 - RNA, 20 nt, synthetic construct
  misc_feature 1..20: note = HBV-targeting guide sequence portion
  source 1..20: mol_type = other RNA
gtcattagttctccccagca

SEQ ID NO: 4441 - RNA, 20 nt, synthetic construct
  misc_feature 1..20: note = HBV-targeting guide sequence portion
  source 1..20: mol_type = other RNA
gtcattgattgttggggatc

SEQ ID NO: 4442 - RNA, 20 nt, synthetic construct
  misc_feature 1..20: note = HBV-targeting guide sequence portion
  source 1..20: mol_type = other RNA
gtccaactggtggtcgggaa

SEQ ID NO: 4443 - RNA, 20 nt, synthetic construct
  misc_feature 1..20: note = HBV-targeting guide sequence portion
  source 1..20: mol_type = other RNA
gtccaagagtcctcttatgt

SEQ ID NO: 4444 - RNA, 20 nt, synthetic construct
  misc_feature 1..20: note = HBV-targeting guide sequence portion
  source 1..20: mol_type = other RNA
gtccaagggatactaacatt

SEQ ID NO: 4445 - RNA, 20 nt, synthetic construct
  misc_feature 1..20: note = HBV-targeting guide sequence portion
  source 1..20: mol_type = other RNA
gtccaccacgagtctagact

SEQ ID NO: 4446 - RNA, 20 nt, synthetic construct
  misc_feature 1..20: note = HBV-targeting guide sequence portion
  source 1..20: mol_type = other RNA
gtccagaagaaccaacaaga

SEQ ID NO: 4447 - RNA, 20 nt, synthetic construct
  misc_feature 1..20: note = HBV-targeting guide sequence portion
  source 1..20: mol_type = other RNA
gtccatgccctaaagccacc

SEQ ID NO: 4448 - RNA, 20 nt, synthetic construct
  misc_feature 1..20: note = HBV-targeting guide sequence portion
  source 1..20: mol_type = other RNA
gtcccaatctggattgttgg

SEQ ID NO: 4449 - RNA, 20 nt, synthetic construct
  misc_feature 1..20: note = HBV-targeting guide sequence portion
  source 1..20: mol_type = other RNA
gtccccaacctccaatcact

SEQ ID NO: 4450 - RNA, 20 nt, synthetic construct
  misc_feature 1..20: note = HBV-targeting guide sequence portion
  source 1..20: mol_type = other RNA
gtccccaatcctcgagaaga

SEQ ID NO: 4451 - RNA, 20 nt, synthetic construct
  misc_feature 1..20: note = HBV-targeting guide sequence portion
  source 1..20: mol_type = other RNA
gtcccctagaagaagaactc

SEQ ID NO: 4452 - RNA, 20 nt, synthetic construct
  misc_feature 1..20: note = HBV-targeting guide sequence portion
  source 1..20: mol_type = other RNA
gtcccgagaatgtttgctcc

SEQ ID NO: 4453 - RNA, 20 nt, synthetic construct
  misc_feature 1..20: note = HBV-targeting guide sequence portion
  source 1..20: mol_type = other RNA
gtcccgcgcaggatccagtt

SEQ ID NO: 4454 - RNA, 20 nt, synthetic construct
  misc_feature 1..20: note = HBV-targeting guide sequence portion
  source 1..20: mol_type = other RNA
gtcccgtcggcgctgaatcc

SEQ ID NO: 4455 - RNA, 20 nt, synthetic construct
  misc_feature 1..20: note = HBV-targeting guide sequence portion
  source 1..20: mol_type = other RNA
gtcccgtgctggtggttgat

SEQ ID NO: 4456 - RNA, 20 nt, synthetic construct
  misc_feature 1..20: note = HBV-targeting guide sequence portion
  source 1..20: mol_type = other RNA
gtccctagatgcttgatctt

SEQ ID NO: 4457 - RNA, 20 nt, synthetic construct
  misc_feature 1..20: note = HBV-targeting guide sequence portion
  source 1..20: mol_type = other RNA
gtccctttataccgctgtta

SEQ ID NO: 4458 - RNA, 20 nt, synthetic construct
  misc_feature 1..20: note = HBV-targeting guide sequence portion
  source 1..20: mol_type = other RNA
gtccgcgggattcagcgccg

SEQ ID NO: 4459 - RNA, 20 nt, synthetic construct
  misc_feature 1..20: note = HBV-targeting guide sequence portion
  source 1..20: mol_type = other RNA
gtccgcgtaaagagaggtgc

SEQ ID NO: 4460 - RNA, 20 nt, synthetic construct
  misc_feature 1..20: note = HBV-targeting guide sequence portion
  source 1..20: mol_type = other RNA
gtccggcagatgagaaggca

SEQ ID NO: 4461 - RNA, 20 nt, synthetic construct
  misc_feature 1..20: note = HBV-targeting guide sequence portion
  source 1..20: mol_type = other RNA
gtcctactgttcaagcctcc

SEQ ID NO: 4462 - RNA, 20 nt, synthetic construct
  misc_feature 1..20: note = HBV-targeting guide sequence portion
  source 1..20: mol_type = other RNA
gtcctagagtatttggtgtc

SEQ ID NO: 4463 - RNA, 20 nt, synthetic construct
  misc_feature 1..20: note = HBV-targeting guide sequence portion
  source 1..20: mol_type = other RNA
gtcctaggaatcctgatgtg

SEQ ID NO: 4464 - RNA, 20 nt, synthetic construct
  misc_feature 1..20: note = HBV-targeting guide sequence portion
  source 1..20: mol_type = other RNA
gtcctccaacttgtcctggt

SEQ ID NO: 4465 - RNA, 20 nt, synthetic construct
  misc_feature 1..20: note = HBV-targeting guide sequence portion
  source 1..20: mol_type = other RNA
gtcctctaattccaggatca

SEQ ID NO: 4466 - RNA, 20 nt, synthetic construct
  misc_feature 1..20: note = HBV-targeting guide sequence portion
  source 1..20: mol_type = other RNA
gtcctctcccgcaaatatac

SEQ ID NO: 4467 - RNA, 20 nt, synthetic construct
  misc_feature 1..20: note = HBV-targeting guide sequence portion
  source 1..20: mol_type = other RNA
gtcctcttatgtaagacctt

SEQ ID NO: 4468 - RNA, 20 nt, synthetic construct
  misc_feature 1..20: note = HBV-targeting guide sequence portion
  source 1..20: mol_type = other RNA
gtcctcttctctgcctgccg

SEQ ID NO: 4469 - RNA, 20 nt, synthetic construct
  misc_feature 1..20: note = HBV-targeting guide sequence portion
  source 1..20: mol_type = other RNA
gtcctgactggcgattggta

SEQ ID NO: 4470 - RNA, 20 nt, synthetic construct
  misc_feature 1..20: note = HBV-targeting guide sequence portion
  source 1..20: mol_type = other RNA
gtcctggttatcgctggatg

SEQ ID NO: 4471 - RNA, 20 nt, synthetic construct
  misc_feature 1..20: note = HBV-targeting guide sequence portion
  source 1..20: mol_type = other RNA
gtcctttgtttacgtcccgt

SEQ ID NO: 4472 - RNA, 20 nt, synthetic construct
  misc_feature 1..20: note = HBV-targeting guide sequence portion
  source 1..20: mol_type = other RNA
gtcgcagaagatctcaatct

SEQ ID NO: 4473 - RNA, 20 nt, synthetic construct
  misc_feature 1..20: note = HBV-targeting guide sequence portion
  source 1..20: mol_type = other RNA
gtcgcatggagaccaccgtg

SEQ ID NO: 4474 - RNA, 20 nt, synthetic construct
  misc_feature 1..20: note = HBV-targeting guide sequence portion
  source 1..20: mol_type = other RNA
gtcggaacagggtttactgt

SEQ ID NO: 4475 - RNA, 20 nt, synthetic construct
  misc_feature 1..20: note = HBV-targeting guide sequence portion
  source 1..20: mol_type = other RNA
gtcggaacggcaggcagaga

SEQ ID NO: 4476 - RNA, 20 nt, synthetic construct
  misc_feature 1..20: note = HBV-targeting guide sequence portion
  source 1..20: mol_type = other RNA
gtcggcgctgaatcccgcgg

SEQ ID NO: 4477 - RNA, 20 nt, synthetic construct
  misc_feature 1..20: note = HBV-targeting guide sequence portion
  source 1..20: mol_type = other RNA
gtcgggaaagaatcccagag

SEQ ID NO: 4478 - RNA, 20 nt, synthetic construct
  misc_feature 1..20: note = HBV-targeting guide sequence portion
  source 1..20: mol_type = other RNA
gtcggtcggaacggcaggca

SEQ ID NO: 4479 - RNA, 20 nt, synthetic construct
  misc_feature 1..20: note = HBV-targeting guide sequence portion
  source 1..20: mol_type = other RNA
gtcggtcgttgacattgcag

SEQ ID NO: 4480 - RNA, 20 nt, synthetic construct
  misc_feature 1..20: note = HBV-targeting guide sequence portion
  source 1..20: mol_type = other RNA
gtcgtccgcgggattcagcg

SEQ ID NO: 4481 - RNA, 20 nt, synthetic construct
  misc_feature 1..20: note = HBV-targeting guide sequence portion
  source 1..20: mol_type = other RNA
gtcgtcctcttctctgcctg

SEQ ID NO: 4482 - RNA, 20 nt, synthetic construct
  misc_feature 1..20: note = HBV-targeting guide sequence portion
  source 1..20: mol_type = other RNA
gtcgtctaacaacacaagtc

SEQ ID NO: 4483 - RNA, 20 nt, synthetic construct
  misc_feature 1..20: note = HBV-targeting guide sequence portion
  source 1..20: mol_type = other RNA
gtcgtgcaggttctgcaggg

SEQ ID NO: 4484 - RNA, 20 nt, synthetic construct
  misc_feature 1..20: note = HBV-targeting guide sequence portion
  source 1..20: mol_type = other RNA
gtcgttgacattgcagagag

SEQ ID NO: 4485 - RNA, 20 nt, synthetic construct
  misc_feature 1..20: note = HBV-targeting guide sequence portion
  source 1..20: mol_type = other RNA
gtctaacaacacaagtctcc

SEQ ID NO: 4486 - RNA, 20 nt, synthetic construct
  misc_feature 1..20: note = HBV-targeting guide sequence portion
  source 1..20: mol_type = other RNA
gtctagactcgtggtggact

SEQ ID NO: 4487 - RNA, 20 nt, synthetic construct
  misc_feature 1..20: note = HBV-targeting guide sequence portion
  source 1..20: mol_type = other RNA
gtctagactctgcggtattg

SEQ ID NO: 4488 - RNA, 20 nt, synthetic construct
  misc_feature 1..20: note = HBV-targeting guide sequence portion
  source 1..20: mol_type = other RNA
gtctagtttggaagtaatga

SEQ ID NO: 4489 - RNA, 20 nt, synthetic construct
  misc_feature 1..20: note = HBV-targeting guide sequence portion
  source 1..20: mol_type = other RNA
gtctataagctggaggagtg

SEQ ID NO: 4490 - RNA, 20 nt, synthetic construct
  misc_feature 1..20: note = HBV-targeting guide sequence portion
  source 1..20: mol_type = other RNA
gtctccacctctgagaaaca

SEQ ID NO: 4491 - RNA, 20 nt, synthetic construct
  misc_feature 1..20: note = HBV-targeting guide sequence portion
  source 1..20: mol_type = other RNA
gtctccatgcgacgtgcaga

SEQ ID NO: 4492 - RNA, 20 nt, synthetic construct
  misc_feature 1..20: note = HBV-targeting guide sequence portion
  source 1..20: mol_type = other RNA
gtctccggaagtgttgatag

SEQ ID NO: 4493 - RNA, 20 nt, synthetic construct
  misc_feature 1..20: note = HBV-targeting guide sequence portion
  source 1..20: mol_type = other RNA
gtctcctgagcattgttcac

SEQ ID NO: 4494 - RNA, 20 nt, synthetic construct
  misc_feature 1..20: note = HBV-targeting guide sequence portion
  source 1..20: mol_type = other RNA
gtctgaactttaggcccata

SEQ ID NO: 4495 - RNA, 20 nt, synthetic construct
  misc_feature 1..20: note = HBV-targeting guide sequence portion
  source 1..20: mol_type = other RNA
gtctgcgaggcgagggagtt

SEQ ID NO: 4496 - RNA, 20 nt, synthetic construct
  misc_feature 1..20: note = HBV-targeting guide sequence portion
  source 1..20: mol_type = other RNA
gtctgcgcaccagcaccatg

SEQ ID NO: 4497 - RNA, 20 nt, synthetic construct
  misc_feature 1..20: note = HBV-targeting guide sequence portion
  source 1..20: mol_type = other RNA
gtctgcggcgttttatcatc

SEQ ID NO: 4498 - RNA, 20 nt, synthetic construct
  misc_feature 1..20: note = HBV-targeting guide sequence portion
  source 1..20: mol_type = other RNA
gtctggagcaaacattctcg

SEQ ID NO: 4499 - RNA, 20 nt, synthetic construct
  misc_feature 1..20: note = HBV-targeting guide sequence portion
  source 1..20: mol_type = other RNA
gtctggccagggatccttgt

SEQ ID NO: 4500 - RNA, 20 nt, synthetic construct
  misc_feature 1..20: note = HBV-targeting guide sequence portion
  source 1..20: mol_type = other RNA
gtctgtacagcatcttgagt

SEQ ID NO: 4501 - RNA, 20 nt, synthetic construct
  misc_feature 1..20: note = HBV-targeting guide sequence portion
  source 1..20: mol_type = other RNA
gtctgtcctctaattccagg

SEQ ID NO: 4502 - RNA, 20 nt, synthetic construct
  misc_feature 1..20: note = HBV-targeting guide sequence portion
  source 1..20: mol_type = other RNA
gtctgtgccaagtgtttgct

SEQ ID NO: 4503 - RNA, 20 nt, synthetic construct
  misc_feature 1..20: note = HBV-targeting guide sequence portion
  source 1..20: mol_type = other RNA
gtctgtgccttctcatctgc

SEQ ID NO: 4504 - RNA, 20 nt, synthetic construct
  misc_feature 1..20: note = HBV-targeting guide sequence portion
  source 1..20: mol_type = other RNA
gtcttacataagaggactct

SEQ ID NO: 4505 - RNA, 20 nt, synthetic construct
  misc_feature 1..20: note = HBV-targeting guide sequence portion
  source 1..20: mol_type = other RNA
gtcttacttttggaagagaa

SEQ ID NO: 4506 - RNA, 20 nt, synthetic construct
  misc_feature 1..20: note = HBV-targeting guide sequence portion
  source 1..20: mol_type = other RNA
gtcttctgggttttgctgcc

SEQ ID NO: 4507 - RNA, 20 nt, synthetic construct
  misc_feature 1..20: note = HBV-targeting guide sequence portion
  source 1..20: mol_type = other RNA
gtcttggccaaaattcgcag

SEQ ID NO: 4508 - RNA, 20 nt, synthetic construct
  misc_feature 1..20: note = HBV-targeting guide sequence portion
  source 1..20: mol_type = other RNA
gtctttaaacaaacagtctt

SEQ ID NO: 4509 - RNA, 20 nt, synthetic construct
  misc_feature 1..20: note = HBV-targeting guide sequence portion
  source 1..20: mol_type = other RNA
gtctttaaccctcattggaa

SEQ ID NO: 4510 - RNA, 20 nt, synthetic construct
  misc_feature 1..20: note = HBV-targeting guide sequence portion
  source 1..20: mol_type = other RNA
gtctttgaagtatgcctcaa

SEQ ID NO: 4511 - RNA, 20 nt, synthetic construct
  misc_feature 1..20: note = HBV-targeting guide sequence portion
  source 1..20: mol_type = other RNA
gtctttgggtgtacatttaa

SEQ ID NO: 4512 - RNA, 20 nt, synthetic construct
  misc_feature 1..20: note = HBV-targeting guide sequence portion
  source 1..20: mol_type = other RNA
gtcttttctcattaactgta

SEQ ID NO: 4513 - RNA, 20 nt, synthetic construct
  misc_feature 1..20: note = HBV-targeting guide sequence portion
  source 1..20: mol_type = other RNA
gtcttttggagtgtggattc

SEQ ID NO: 4514 - RNA, 20 nt, synthetic construct
  misc_feature 1..20: note = HBV-targeting guide sequence portion
  source 1..20: mol_type = other RNA
gtgaaaaagttgcatggtgc

SEQ ID NO: 4515 - RNA, 20 nt, synthetic construct
  misc_feature 1..20: note = HBV-targeting guide sequence portion
  source 1..20: mol_type = other RNA
gtgaaaccacaatagttgtc

SEQ ID NO: 4516 - RNA, 20 nt, synthetic construct
  misc_feature 1..20: note = HBV-targeting guide sequence portion
  source 1..20: mol_type = other RNA
gtgaaagcctgcttagattg

SEQ ID NO: 4517 - RNA, 20 nt, synthetic construct
  misc_feature 1..20: note = HBV-targeting guide sequence portion
  source 1..20: mol_type = other RNA
gtgaacaatgctcaggagac

SEQ ID NO: 4518 - RNA, 20 nt, synthetic construct
  misc_feature 1..20: note = HBV-targeting guide sequence portion
  source 1..20: mol_type = other RNA
gtgaacagtttgtaggcccg

SEQ ID NO: 4519 - RNA, 20 nt, synthetic construct
  misc_feature 1..20: note = HBV-targeting guide sequence portion
  source 1..20: mol_type = other RNA
gtgaaccctagcccgaatgc

SEQ ID NO: 4520 - RNA, 20 nt, synthetic construct
  misc_feature 1..20: note = HBV-targeting guide sequence portion
  source 1..20: mol_type = other RNA
gtgaacgcccaccaattctt

SEQ ID NO: 4521 - RNA, 20 nt, synthetic construct
  misc_feature 1..20: note = HBV-targeting guide sequence portion
  source 1..20: mol_type = other RNA
gtgaagcgaagtgcacacgg

SEQ ID NO: 4522 - RNA, 20 nt, synthetic construct
  misc_feature 1..20: note = HBV-targeting guide sequence portion
  source 1..20: mol_type = other RNA
gtgaatttaggataaaacct

SEQ ID NO: 4523 - RNA, 20 nt, synthetic construct
  misc_feature 1..20: note = HBV-targeting guide sequence portion
  source 1..20: mol_type = other RNA
gtgacccacagaatgaggcg

SEQ ID NO: 4524 - RNA, 20 nt, synthetic construct
  misc_feature 1..20: note = HBV-targeting guide sequence portion
  source 1..20: mol_type = other RNA
gtgagaggcagtagtcggaa

SEQ ID NO: 4525 - RNA, 20 nt, synthetic construct
  misc_feature 1..20: note = HBV-targeting guide sequence portion
  source 1..20: mol_type = other RNA
gtgagaggcctgtatctccc

SEQ ID NO: 4526 - RNA, 20 nt, synthetic construct
  misc_feature 1..20: note = HBV-targeting guide sequence portion
  source 1..20: mol_type = other RNA
gtgaggattcttgtcaacaa

SEQ ID NO: 4527 - RNA, 20 nt, synthetic construct
  misc_feature 1..20: note = HBV-targeting guide sequence portion
  source 1..20: mol_type = other RNA
gtgaggtgaacaatgctcag

SEQ ID NO: 4528 - RNA, 20 nt, synthetic construct
  misc_feature 1..20: note = HBV-targeting guide sequence portion
  source 1..20: mol_type = other RNA
gtgagtgattggaggttggg

SEQ ID NO: 4529 - RNA, 20 nt, synthetic construct
  misc_feature 1..20: note = HBV-targeting guide sequence portion
  source 1..20: mol_type = other RNA
gtgatgttctccatgttcag

SEQ ID NO: 4530 - RNA, 20 nt, synthetic construct
  misc_feature 1..20: note = HBV-targeting guide sequence portion
  source 1..20: mol_type = other RNA
gtgattggaggttggggact

SEQ ID NO: 4531 - RNA, 20 nt, synthetic construct
  misc_feature 1..20: note = HBV-targeting guide sequence portion
  source 1..20: mol_type = other RNA
gtgattttgtggcaatgatc

SEQ ID NO: 4532 - RNA, 20 nt, synthetic construct
  misc_feature 1..20: note = HBV-targeting guide sequence portion
  source 1..20: mol_type = other RNA
gtgcacacggtccggcagat

SEQ ID NO: 4533 - RNA, 20 nt, synthetic construct
  misc_feature 1..20: note = HBV-targeting guide sequence portion
  source 1..20: mol_type = other RNA
gtgcacttcgcttcacctct

SEQ ID NO: 4534 - RNA, 20 nt, synthetic construct
  misc_feature 1..20: note = HBV-targeting guide sequence portion
  source 1..20: mol_type = other RNA
gtgcagaggtgaagcgaagt

SEQ ID NO: 4535 - RNA, 20 nt, synthetic construct
  misc_feature 1..20: note = HBV-targeting guide sequence portion
  source 1..20: mol_type = other RNA
gtgcaggttctgcagggtcc

SEQ ID NO: 4536 - RNA, 20 nt, synthetic construct
  misc_feature 1..20: note = HBV-targeting guide sequence portion
  source 1..20: mol_type = other RNA
gtgcagtatggtgaggtgaa

SEQ ID NO: 4537 - RNA, 20 nt, synthetic construct
  misc_feature 1..20: note = HBV-targeting guide sequence portion
  source 1..20: mol_type = other RNA
gtgcagtttccatccgaagg

SEQ ID NO: 4538 - RNA, 20 nt, synthetic construct
  misc_feature 1..20: note = HBV-targeting guide sequence portion
  source 1..20: mol_type = other RNA
gtgccaagtgtttgctgatg

SEQ ID NO: 4539 - RNA, 20 nt, synthetic construct
  misc_feature 1..20: note = HBV-targeting guide sequence portion
  source 1..20: mol_type = other RNA
gtgccatttgttcagtggtt

SEQ ID NO: 4540 - RNA, 20 nt, synthetic construct
  misc_feature 1..20: note = HBV-targeting guide sequence portion
  source 1..20: mol_type = other RNA
gtgccttctcatctgccgga

SEQ ID NO: 4541 - RNA, 20 nt, synthetic construct
  misc_feature 1..20: note = HBV-targeting guide sequence portion
  source 1..20: mol_type = other RNA
gtgccttgggtggctttagg

SEQ ID NO: 4542 - RNA, 20 nt, synthetic construct
  misc_feature 1..20: note = HBV-targeting guide sequence portion
  source 1..20: mol_type = other RNA
gtgcgaatccacactccaaa

SEQ ID NO: 4543 - RNA, 20 nt, synthetic construct
  misc_feature 1..20: note = HBV-targeting guide sequence portion
  source 1..20: mol_type = other RNA
gtgcgcagaccaatttatgc

SEQ ID NO: 4544 - RNA, 20 nt, synthetic construct
  misc_feature 1..20: note = HBV-targeting guide sequence portion
  source 1..20: mol_type = other RNA
gtgcgccccgtggtcggtcg

SEQ ID NO: 4545 - RNA, 20 nt, synthetic construct
  misc_feature 1..20: note = HBV-targeting guide sequence portion
  source 1..20: mol_type = other RNA
gtgcggtggggtgaacccta

SEQ ID NO: 4546 - RNA, 20 nt, synthetic construct
  misc_feature 1..20: note = HBV-targeting guide sequence portion
  source 1..20: mol_type = other RNA
gtgctgccaactggatcctg

SEQ ID NO: 4547 - RNA, 20 nt, synthetic construct
  misc_feature 1..20: note = HBV-targeting guide sequence portion
  source 1..20: mol_type = other RNA
gtgctggtgcgcagaccaat

SEQ ID NO: 4548 - RNA, 20 nt, synthetic construct
  misc_feature 1..20: note = HBV-targeting guide sequence portion
  source 1..20: mol_type = other RNA
gtgctggtggttgatgatcc

SEQ ID NO: 4549 - RNA, 20 nt, synthetic construct
  misc_feature 1..20: note = HBV-targeting guide sequence portion
  source 1..20: mol_type = other RNA
gtggaaagattctgccccat

SEQ ID NO: 4550 - RNA, 20 nt, synthetic construct
  misc_feature 1..20: note = HBV-targeting guide sequence portion
  source 1..20: mol_type = other RNA
gtggaacctttccggctcct

SEQ ID NO: 4551 - RNA, 20 nt, synthetic construct
  misc_feature 1..20: note = HBV-targeting guide sequence portion
  source 1..20: mol_type = other RNA
gtggacttctctcaattttc

SEQ ID NO: 4552 - RNA, 20 nt, synthetic construct
  misc_feature 1..20: note = HBV-targeting guide sequence portion
  source 1..20: mol_type = other RNA
gtggagacagcggggtaggc

SEQ ID NO: 4553 - RNA, 20 nt, synthetic construct
  misc_feature 1..20: note = HBV-targeting guide sequence portion
  source 1..20: mol_type = other RNA
gtggagccctcaggctcagg

SEQ ID NO: 4554 - RNA, 20 nt, synthetic construct
  misc_feature 1..20: note = HBV-targeting guide sequence portion
  source 1..20: mol_type = other RNA
gtggagttactctcgttttt

SEQ ID NO: 4555 - RNA, 20 nt, synthetic construct
  misc_feature 1..20: note = HBV-targeting guide sequence portion
  source 1..20: mol_type = other RNA
gtggattcgcactcctccag

SEQ ID NO: 4556 - RNA, 20 nt, synthetic construct
  misc_feature 1..20: note = HBV-targeting guide sequence portion
  source 1..20: mol_type = other RNA
gtggcaatgatccccaacaa

SEQ ID NO: 4557 - RNA, 20 nt, synthetic construct
  misc_feature 1..20: note = HBV-targeting guide sequence portion
  source 1..20: mol_type = other RNA
gtggctccagttcaggaaca

SEQ ID NO: 4558 - RNA, 20 nt, synthetic construct
  misc_feature 1..20: note = HBV-targeting guide sequence portion
  source 1..20: mol_type = other RNA
gtggctttagggcatggaca

SEQ ID NO: 4559 - RNA, 20 nt, synthetic construct
  misc_feature 1..20: note = HBV-targeting guide sequence portion
  source 1..20: mol_type = other RNA
gtgggaaattttacggggct

SEQ ID NO: 4560 - RNA, 20 nt, synthetic construct
  misc_feature 1..20: note = HBV-targeting guide sequence portion
  source 1..20: mol_type = other RNA
gtgggcctcagcccgtttct

SEQ ID NO: 4561 - RNA, 20 nt, synthetic construct
  misc_feature 1..20: note = HBV-targeting guide sequence portion
  source 1..20: mol_type = other RNA
gtgggcgttcacggtggtct

SEQ ID NO: 4562 - RNA, 20 nt, synthetic construct
  misc_feature 1..20: note = HBV-targeting guide sequence portion
  source 1..20: mol_type = other RNA
gtgggggaaagccctacgaa

SEQ ID NO: 4563 - RNA, 20 nt, synthetic construct
  misc_feature 1..20: note = HBV-targeting guide sequence portion
  source 1..20: mol_type = other RNA
gtgggggttgcatcagcaaa

SEQ ID NO: 4564 - RNA, 20 nt, synthetic construct
  misc_feature 1..20: note = HBV-targeting guide sequence portion
  source 1..20: mol_type = other RNA
gtggggtgaaccctagcccg

SEQ ID NO: 4565 - RNA, 20 nt, synthetic construct
  misc_feature 1..20: note = HBV-targeting guide sequence portion
  source 1..20: mol_type = other RNA
gtgggtactaatttagaaga

SEQ ID NO: 4566 - RNA, 20 nt, synthetic construct
  misc_feature 1..20: note = HBV-targeting guide sequence portion
  source 1..20: mol_type = other RNA
gtgggtcaccatattcttgg

SEQ ID NO: 4567 - RNA, 20 nt, synthetic construct
  misc_feature 1..20: note = HBV-targeting guide sequence portion
  source 1..20: mol_type = other RNA
gtgggtcttctgggttttgc

SEQ ID NO: 4568 - RNA, 20 nt, synthetic construct
  misc_feature 1..20: note = HBV-targeting guide sequence portion
  source 1..20: mol_type = other RNA
gtggtattgggggccaagtc

SEQ ID NO: 4569 - RNA, 20 nt, synthetic construct
  misc_feature 1..20: note = HBV-targeting guide sequence portion
  source 1..20: mol_type = other RNA
gtggtcgggaaagaatccca

SEQ ID NO: 4570 - RNA, 20 nt, synthetic construct
  misc_feature 1..20: note = HBV-targeting guide sequence portion
  source 1..20: mol_type = other RNA
gtggtcggtcggaacggcag

SEQ ID NO: 4571 - RNA, 20 nt, synthetic construct
  misc_feature 1..20: note = HBV-targeting guide sequence portion
  source 1..20: mol_type = other RNA
gtggtctataagctggagga

SEQ ID NO: 4572 - RNA, 20 nt, synthetic construct
  misc_feature 1..20: note = HBV-targeting guide sequence portion
  source 1..20: mol_type = other RNA
gtggtctccatgcgacgtgc

SEQ ID NO: 4573 - RNA, 20 nt, synthetic construct
  misc_feature 1..20: note = HBV-targeting guide sequence portion
  source 1..20: mol_type = other RNA
gtggtggacttctctcaatt

SEQ ID NO: 4574 - RNA, 20 nt, synthetic construct
  misc_feature 1..20: note = HBV-targeting guide sequence portion
  source 1..20: mol_type = other RNA
gtggttatcctgctttaatg

SEQ ID NO: 4575 - RNA, 20 nt, synthetic construct
  misc_feature 1..20: note = HBV-targeting guide sequence portion
  source 1..20: mol_type = other RNA
gtggttcgtagggctttccc

SEQ ID NO: 4576 - RNA, 20 nt, synthetic construct
  misc_feature 1..20: note = HBV-targeting guide sequence portion
  source 1..20: mol_type = other RNA
gtggttgatgatcctggaat

SEQ ID NO: 4577 - RNA, 20 nt, synthetic construct
  misc_feature 1..20: note = HBV-targeting guide sequence portion
  source 1..20: mol_type = other RNA
gtggtttcacatttcttgtc

SEQ ID NO: 4578 - RNA, 20 nt, synthetic construct
  misc_feature 1..20: note = HBV-targeting guide sequence portion
  source 1..20: mol_type = other RNA
gtgtaaaaggggcagcaaaa

SEQ ID NO: 4579 - RNA, 20 nt, synthetic construct
  misc_feature 1..20: note = HBV-targeting guide sequence portion
  source 1..20: mol_type = other RNA
gtgtaaacaatacctgaacc

SEQ ID NO: 4580 - RNA, 20 nt, synthetic construct
  misc_feature 1..20: note = HBV-targeting guide sequence portion
  source 1..20: mol_type = other RNA
gtgtaaatagtgtctagttt

SEQ ID NO: 4581 - RNA, 20 nt, synthetic construct
  misc_feature 1..20: note = HBV-targeting guide sequence portion
  source 1..20: mol_type = other RNA
gtgtacatttaaaccctaac

SEQ ID NO: 4582 - RNA, 20 nt, synthetic construct
  misc_feature 1..20: note = HBV-targeting guide sequence portion
  source 1..20: mol_type = other RNA
gtgtagatgtatattaggaa

SEQ ID NO: 4583 - RNA, 20 nt, synthetic construct
  misc_feature 1..20: note = HBV-targeting guide sequence portion
  source 1..20: mol_type = other RNA
gtgtatgatgtgattttgtg

SEQ ID NO: 4584 - RNA, 20 nt, synthetic construct
  misc_feature 1..20: note = HBV-targeting guide sequence portion
  source 1..20: mol_type = other RNA
gtgtcaacacatagcgcctc

SEQ ID NO: 4585 - RNA, 20 nt, synthetic construct
  misc_feature 1..20: note = HBV-targeting guide sequence portion
  source 1..20: mol_type = other RNA
gtgtcaacgaattgtgggtc

SEQ ID NO: 4586 - RNA, 20 nt, synthetic construct
  misc_feature 1..20: note = HBV-targeting guide sequence portion
  source 1..20: mol_type = other RNA
gtgtctagtttggaagtaat

SEQ ID NO: 4587 - RNA, 20 nt, synthetic construct
  misc_feature 1..20: note = HBV-targeting guide sequence portion
  source 1..20: mol_type = other RNA
gtgtctgcggcgttttatca

SEQ ID NO: 4588 - RNA, 20 nt, synthetic construct
  misc_feature 1..20: note = HBV-targeting guide sequence portion
  source 1..20: mol_type = other RNA
gtgtcttggccaaaattcgc

SEQ ID NO: 4589 - RNA, 20 nt, synthetic construct
  misc_feature 1..20: note = HBV-targeting guide sequence portion
  source 1..20: mol_type = other RNA
gtgtcttttggagtgtggat

SEQ ID NO: 4590 - RNA, 20 nt, synthetic construct
  misc_feature 1..20: note = HBV-targeting guide sequence portion
  source 1..20: mol_type = other RNA
gtgtgcacttcgcttcacct

SEQ ID NO: 4591 - RNA, 20 nt, synthetic construct
  misc_feature 1..20: note = HBV-targeting guide sequence portion
  source 1..20: mol_type = other RNA
gtgtggattcgcactcctcc

SEQ ID NO: 4592 - RNA, 20 nt, synthetic construct
  misc_feature 1..20: note = HBV-targeting guide sequence portion
  source 1..20: mol_type = other RNA
gtgtgtaaatagtgtctagt

SEQ ID NO: 4593 - RNA, 20 nt, synthetic construct
  misc_feature 1..20: note = HBV-targeting guide sequence portion
  source 1..20: mol_type = other RNA
gtgtgtcaacgaattgtggg

SEQ ID NO: 4594 - RNA, 20 nt, synthetic construct
  misc_feature 1..20: note = HBV-targeting guide sequence portion
  source 1..20: mol_type = other RNA
gtgtgtcttggccaaaattc

SEQ ID NO: 4595 - RNA, 20 nt, synthetic construct
  misc_feature 1..20: note = HBV-targeting guide sequence portion
  source 1..20: mol_type = other RNA
gtgttacaggcggggttttc

SEQ ID NO: 4596 - RNA, 20 nt, synthetic construct
  misc_feature 1..20: note = HBV-targeting guide sequence portion
  source 1..20: mol_type = other RNA
gtgttgacactctcttatat

SEQ ID NO: 4597 - RNA, 20 nt, synthetic construct
  misc_feature 1..20: note = HBV-targeting guide sequence portion
  source 1..20: mol_type = other RNA
gtgttgacataactgactac

SEQ ID NO: 4598 - RNA, 20 nt, synthetic construct
  misc_feature 1..20: note = HBV-targeting guide sequence portion
  source 1..20: mol_type = other RNA
gtgttgataggataggggca

SEQ ID NO: 4599 - RNA, 20 nt, synthetic construct
  misc_feature 1..20: note = HBV-targeting guide sequence portion
  source 1..20: mol_type = other RNA
gtgttgttagacgacgaggc

SEQ ID NO: 4600 - RNA, 20 nt, synthetic construct
  misc_feature 1..20: note = HBV-targeting guide sequence portion
  source 1..20: mol_type = other RNA
gtgtttctcagaggtggaga

SEQ ID NO: 4601 - RNA, 20 nt, synthetic construct
  misc_feature 1..20: note = HBV-targeting guide sequence portion
  source 1..20: mol_type = other RNA
gtgtttgctgatgcaacccc

SEQ ID NO: 4602 - RNA, 20 nt, synthetic construct
  misc_feature 1..20: note = HBV-targeting guide sequence portion
  source 1..20: mol_type = other RNA
gtgttttatataagagagtg

SEQ ID NO: 4603 - RNA, 20 nt, synthetic construct
  misc_feature 1..20: note = HBV-targeting guide sequence portion
  source 1..20: mol_type = other RNA
gtgttttccaatgagggtta

SEQ ID NO: 4604 - RNA, 20 nt, synthetic construct
  misc_feature 1..20: note = HBV-targeting guide sequence portion
  source 1..20: mol_type = other RNA
gttaaagacaggtacagtag

SEQ ID NO: 4605 - RNA, 20 nt, synthetic construct
  misc_feature 1..20: note = HBV-targeting guide sequence portion
  source 1..20: mol_type = other RNA
gttaacaggcctattgattg

SEQ ID NO: 4606 - RNA, 20 nt, synthetic construct
  misc_feature 1..20: note = HBV-targeting guide sequence portion
  source 1..20: mol_type = other RNA
gttaaccgggagttttctga

SEQ ID NO: 4607 - RNA, 20 nt, synthetic construct
  misc_feature 1..20: note = HBV-targeting guide sequence portion
  source 1..20: mol_type = other RNA
gttaatcattacttccaaac

SEQ ID NO: 4608 - RNA, 20 nt, synthetic construct
  misc_feature 1..20: note = HBV-targeting guide sequence portion
  source 1..20: mol_type = other RNA
gttaatgagaaaagacggtt

SEQ ID NO: 4609 - RNA, 20 nt, synthetic construct
  misc_feature 1..20: note = HBV-targeting guide sequence portion
  source 1..20: mol_type = other RNA
gttacaggcggggttttcct

SEQ ID NO: 4610 - RNA, 20 nt, synthetic construct
  misc_feature 1..20: note = HBV-targeting guide sequence portion
  source 1..20: mol_type = other RNA
gttaccaattttcttttgtc

SEQ ID NO: 4611 - RNA, 20 nt, synthetic construct
  misc_feature 1..20: note = HBV-targeting guide sequence portion
  source 1..20: mol_type = other RNA
gttactctcgtttttgcctt

SEQ ID NO: 4612 - RNA, 20 nt, synthetic construct
  misc_feature 1..20: note = HBV-targeting guide sequence portion
  source 1..20: mol_type = other RNA
gttagacgacgaggcaggtc

SEQ ID NO: 4613 - RNA, 20 nt, synthetic construct
  misc_feature 1..20: note = HBV-targeting guide sequence portion
  source 1..20: mol_type = other RNA
gttagggtttaaatgtacac

SEQ ID NO: 4614 - RNA, 20 nt, synthetic construct
  misc_feature 1..20: note = HBV-targeting guide sequence portion
  source 1..20: mol_type = other RNA
gttagtatcccttggactca

SEQ ID NO: 4615 - RNA, 20 nt, synthetic construct
  misc_feature 1..20: note = HBV-targeting guide sequence portion
  source 1..20: mol_type = other RNA
gttatatggatgatgtggta

SEQ ID NO: 4616 - RNA, 20 nt, synthetic construct
  misc_feature 1..20: note = HBV-targeting guide sequence portion
  source 1..20: mol_type = other RNA
gttatcctgctttaatgccc

SEQ ID NO: 4617 - RNA, 20 nt, synthetic construct
  misc_feature 1..20: note = HBV-targeting guide sequence portion
  source 1..20: mol_type = other RNA
gttatcgctggatgtgtctg

SEQ ID NO: 4618 - RNA, 20 nt, synthetic construct
  misc_feature 1..20: note = HBV-targeting guide sequence portion
  source 1..20: mol_type = other RNA
gttatgtcaacactcatatg

SEQ ID NO: 4619 - RNA, 20 nt, synthetic construct
  misc_feature 1..20: note = HBV-targeting guide sequence portion
  source 1..20: mol_type = other RNA
gttattctcttaatttcatg

SEQ ID NO: 4620 - RNA, 20 nt, synthetic construct
  misc_feature 1..20: note = HBV-targeting guide sequence portion
  source 1..20: mol_type = other RNA
gttcaagcctccaagctgtg

SEQ ID NO: 4621 - RNA, 20 nt, synthetic construct
  misc_feature 1..20: note = HBV-targeting guide sequence portion
  source 1..20: mol_type = other RNA
gttcacattttttgataata

SEQ ID NO: 4622 - RNA, 20 nt, synthetic construct
  misc_feature 1..20: note = HBV-targeting guide sequence portion
  source 1..20: mol_type = other RNA
gttcaccccaccgcacggag

SEQ ID NO: 4623 - RNA, 20 nt, synthetic construct
  misc_feature 1..20: note = HBV-targeting guide sequence portion
  source 1..20: mol_type = other RNA
gttcacctcaccatactgca

SEQ ID NO: 4624 - RNA, 20 nt, synthetic construct
  misc_feature 1..20: note = HBV-targeting guide sequence portion
  source 1..20: mol_type = other RNA
gttcacggtggtctccatgc

SEQ ID NO: 4625 - RNA, 20 nt, synthetic construct
  misc_feature 1..20: note = HBV-targeting guide sequence portion
  source 1..20: mol_type = other RNA
gttcagacaactattgtggt

SEQ ID NO: 4626 - RNA, 20 nt, synthetic construct
  misc_feature 1..20: note = HBV-targeting guide sequence portion
  source 1..20: mol_type = other RNA
gttcagcgcagggtccccaa

SEQ ID NO: 4627 - RNA, 20 nt, synthetic construct
  misc_feature 1..20: note = HBV-targeting guide sequence portion
  source 1..20: mol_type = other RNA
gttcaggaacagtaaaccct

SEQ ID NO: 4628 - RNA, 20 nt, synthetic construct
  misc_feature 1..20: note = HBV-targeting guide sequence portion
  source 1..20: mol_type = other RNA
gttcaggtattgtttacaca

SEQ ID NO: 4629 - RNA, 20 nt, synthetic construct
  misc_feature 1..20: note = HBV-targeting guide sequence portion
  source 1..20: mol_type = other RNA
gttcagtggttcgtagggct

SEQ ID NO: 4630 - RNA, 20 nt, synthetic construct
  misc_feature 1..20: note = HBV-targeting guide sequence portion
  source 1..20: mol_type = other RNA
gttcatgtcctactgttcaa

SEQ ID NO: 4631 - RNA, 20 nt, synthetic construct
  misc_feature 1..20: note = HBV-targeting guide sequence portion
  source 1..20: mol_type = other RNA
gttccacgcatgcgctgatg

SEQ ID NO: 4632 - RNA, 20 nt, synthetic construct
  misc_feature 1..20: note = HBV-targeting guide sequence portion
  source 1..20: mol_type = other RNA
gttcccaagaatatggtgac

SEQ ID NO: 4633 - RNA, 20 nt, synthetic construct
  misc_feature 1..20: note = HBV-targeting guide sequence portion
  source 1..20: mol_type = other RNA
gttcccatggctgctaggct

SEQ ID NO: 4634 - RNA, 20 nt, synthetic construct
  misc_feature 1..20: note = HBV-targeting guide sequence portion
  source 1..20: mol_type = other RNA
gttccccctagaaaattgag

SEQ ID NO: 4635 - RNA, 20 nt, synthetic construct
  misc_feature 1..20: note = HBV-targeting guide sequence portion
  source 1..20: mol_type = other RNA
gttccgaccgaccacggggc

SEQ ID NO: 4636 - RNA, 20 nt, synthetic construct
  misc_feature 1..20: note = HBV-targeting guide sequence portion
  source 1..20: mol_type = other RNA
gttccgactactgcctctca

SEQ ID NO: 4637 - RNA, 20 nt, synthetic construct
  misc_feature 1..20: note = HBV-targeting guide sequence portion
  source 1..20: mol_type = other RNA
gttccgcagtatggatcggc

SEQ ID NO: 4638 - RNA, 20 nt, synthetic construct
  misc_feature 1..20: note = HBV-targeting guide sequence portion
  source 1..20: mol_type = other RNA
gttcctgaactggagccacc

SEQ ID NO: 4639 - RNA, 20 nt, synthetic construct
  misc_feature 1..20: note = HBV-targeting guide sequence portion
  source 1..20: mol_type = other RNA
gttccttgagcaggagtcgt

SEQ ID NO: 4640 - RNA, 20 nt, synthetic construct
  misc_feature 1..20: note = HBV-targeting guide sequence portion
  source 1..20: mol_type = other RNA
gttcgtagggctttccccca

SEQ ID NO: 4641 - RNA, 20 nt, synthetic construct
  misc_feature 1..20: note = HBV-targeting guide sequence portion
  source 1..20: mol_type = other RNA
gttctccatgttcagcgcag

SEQ ID NO: 4642 - RNA, 20 nt, synthetic construct
  misc_feature 1..20: note = HBV-targeting guide sequence portion
  source 1..20: mol_type = other RNA
gttctccccagcaaagaatt

SEQ ID NO: 4643 - RNA, 20 nt, synthetic construct
  misc_feature 1..20: note = HBV-targeting guide sequence portion
  source 1..20: mol_type = other RNA
gttctgcagggtcccgtgct

SEQ ID NO: 4644 - RNA, 20 nt, synthetic construct
  misc_feature 1..20: note = HBV-targeting guide sequence portion
  source 1..20: mol_type = other RNA
gttctggataataaggttta

SEQ ID NO: 4645 - RNA, 20 nt, synthetic construct
  misc_feature 1..20: note = HBV-targeting guide sequence portion
  source 1..20: mol_type = other RNA
gttcttctggactatcaagg

SEQ ID NO: 4646 - RNA, 20 nt, synthetic construct
  misc_feature 1..20: note = HBV-targeting guide sequence portion
  source 1..20: mol_type = other RNA
gttcttcttctaggggacct

SEQ ID NO: 4647 - RNA, 20 nt, synthetic construct
  misc_feature 1..20: note = HBV-targeting guide sequence portion
  source 1..20: mol_type = other RNA
gttgaaattgattatgcctg

SEQ ID NO: 4648 - RNA, 20 nt, synthetic construct
  misc_feature 1..20: note = HBV-targeting guide sequence portion
  source 1..20: mol_type = other RNA
gttgacaagaatcctcacaa

SEQ ID NO: 4649 - RNA, 20 nt, synthetic construct
  misc_feature 1..20: note = HBV-targeting guide sequence portion
  source 1..20: mol_type = other RNA
gttgacacactttccaatca

SEQ ID NO: 4650 - RNA, 20 nt, synthetic construct
  misc_feature 1..20: note = HBV-targeting guide sequence portion
  source 1..20: mol_type = other RNA
gttgacactctcttatataa

SEQ ID NO: 4651 - RNA, 20 nt, synthetic construct
  misc_feature 1..20: note = HBV-targeting guide sequence portion
  source 1..20: mol_type = other RNA
gttgacataactgactacta

SEQ ID NO: 4652 - RNA, 20 nt, synthetic construct
  misc_feature 1..20: note = HBV-targeting guide sequence portion
  source 1..20: mol_type = other RNA
gttgacattgcagagagtcc

SEQ ID NO: 4653 - RNA, 20 nt, synthetic construct
  misc_feature 1..20: note = HBV-targeting guide sequence portion
  source 1..20: mol_type = other RNA
gttgataggataggggcatt

SEQ ID NO: 4654 - RNA, 20 nt, synthetic construct
  misc_feature 1..20: note = HBV-targeting guide sequence portion
  source 1..20: mol_type = other RNA
gttgatgatcctggaattag

SEQ ID NO: 4655 - RNA, 20 nt, synthetic construct
  misc_feature 1..20: note = HBV-targeting guide sequence portion
  source 1..20: mol_type = other RNA
gttgcatcagcaaacacttg

SEQ ID NO: 4656 - RNA, 20 nt, synthetic construct
  misc_feature 1..20: note = HBV-targeting guide sequence portion
  source 1..20: mol_type = other RNA
gttgcatggtgctggtgcgc

SEQ ID NO: 4657 - RNA, 20 nt, synthetic construct
  misc_feature 1..20: note = HBV-targeting guide sequence portion
  source 1..20: mol_type = other RNA
gttgccaggcaacggccagg

SEQ ID NO: 4658 - RNA, 20 nt, synthetic construct
  misc_feature 1..20: note = HBV-targeting guide sequence portion
  source 1..20: mol_type = other RNA
gttgcctggcaacggggtaa

SEQ ID NO: 4659 - RNA, 20 nt, synthetic construct
  misc_feature 1..20: note = HBV-targeting guide sequence portion
  source 1..20: mol_type = other RNA
gttgctgtacaaaaccttcg

SEQ ID NO: 4660 - RNA, 20 nt, synthetic construct
  misc_feature 1..20: note = HBV-targeting guide sequence portion
  source 1..20: mol_type = other RNA
gttggacccagccttcagag

SEQ ID NO: 4661 - RNA, 20 nt, synthetic construct
  misc_feature 1..20: note = HBV-targeting guide sequence portion
  source 1..20: mol_type = other RNA
gttggaggacaggaggttgg

SEQ ID NO: 4662 - RNA, 20 nt, synthetic construct
  misc_feature 1..20: note = HBV-targeting guide sequence portion
  source 1..20: mol_type = other RNA
gttggagtttgctctgaagg

SEQ ID NO: 4663 - RNA, 20 nt, synthetic construct
  misc_feature 1..20: note = HBV-targeting guide sequence portion
  source 1..20: mol_type = other RNA
gttggcagcacagcctagca

SEQ ID NO: 4664 - RNA, 20 nt, synthetic construct
  misc_feature 1..20: note = HBV-targeting guide sequence portion
  source 1..20: mol_type = other RNA
gttggcgaaaaagtgaaagc

SEQ ID NO: 4665 - RNA, 20 nt, synthetic construct
  misc_feature 1..20: note = HBV-targeting guide sequence portion
  source 1..20: mol_type = other RNA
gttggcgtctggccagggat

SEQ ID NO: 4666 - RNA, 20 nt, synthetic construct
  misc_feature 1..20: note = HBV-targeting guide sequence portion
  source 1..20: mol_type = other RNA
gttgggattgaagtcccaat

SEQ ID NO: 4667 - RNA, 20 nt, synthetic construct
  misc_feature 1..20: note = HBV-targeting guide sequence portion
  source 1..20: mol_type = other RNA
gttggggactgcgaattttg

SEQ ID NO: 4668 - RNA, 20 nt, synthetic construct
  misc_feature 1..20: note = HBV-targeting guide sequence portion
  source 1..20: mol_type = other RNA
gttggggatcattgccacaa

SEQ ID NO: 4669 - RNA, 20 nt, synthetic construct
  misc_feature 1..20: note = HBV-targeting guide sequence portion
  source 1..20: mol_type = other RNA
gttggggcttggtcataggc

SEQ ID NO: 4670 - RNA, 20 nt, synthetic construct
  misc_feature 1..20: note = HBV-targeting guide sequence portion
  source 1..20: mol_type = other RNA
gttgggggaggagattagat

SEQ ID NO: 4671 - RNA, 20 nt, synthetic construct
  misc_feature 1..20: note = HBV-targeting guide sequence portion
  source 1..20: mol_type = other RNA
gttggtgagtgattggaggt

SEQ ID NO: 4672 - RNA, 20 nt, synthetic construct
  misc_feature 1..20: note = HBV-targeting guide sequence portion
  source 1..20: mol_type = other RNA
gttggttcttctggactatc

SEQ ID NO: 4673 - RNA, 20 nt, synthetic construct
  misc_feature 1..20: note = HBV-targeting guide sequence portion
  source 1..20: mol_type = other RNA
gttgtcagtcccgagaatgt

SEQ ID NO: 4674 - RNA, 20 nt, synthetic construct
  misc_feature 1..20: note = HBV-targeting guide sequence portion
  source 1..20: mol_type = other RNA
gttgtcctctcccgcaaata

SEQ ID NO: 4675 - RNA, 20 nt, synthetic construct
  misc_feature 1..20: note = HBV-targeting guide sequence portion
  source 1..20: mol_type = other RNA
gttgtctgaactttaggccc

SEQ ID NO: 4676 - RNA, 20 nt, synthetic construct
  misc_feature 1..20: note = HBV-targeting guide sequence portion
  source 1..20: mol_type = other RNA
gttgttagacgacgaggcag

SEQ ID NO: 4677 - RNA, 20 nt, synthetic construct
  misc_feature 1..20: note = HBV-targeting guide sequence portion
  source 1..20: mol_type = other RNA
gtttaaagactgggaggagt

SEQ ID NO: 4678 - RNA, 20 nt, synthetic construct
  misc_feature 1..20: note = HBV-targeting guide sequence portion
  source 1..20: mol_type = other RNA
gtttaaatgtacacccaaag

SEQ ID NO: 4679 - RNA, 20 nt, synthetic construct
  misc_feature 1..20: note = HBV-targeting guide sequence portion
  source 1..20: mol_type = other RNA
gtttaatacccttatccaag

SEQ ID NO: 4680 - RNA, 20 nt, synthetic construct
  misc_feature 1..20: note = HBV-targeting guide sequence portion
  source 1..20: mol_type = other RNA
gtttacacagaaaggccttg

SEQ ID NO: 4681 - RNA, 20 nt, synthetic construct
  misc_feature 1..20: note = HBV-targeting guide sequence portion
  source 1..20: mol_type = other RNA
gtttacgtcccgtcggcgct

SEQ ID NO: 4682 - RNA, 20 nt, synthetic construct
  misc_feature 1..20: note = HBV-targeting guide sequence portion
  source 1..20: mol_type = other RNA
gtttactagtgccatttgtt

SEQ ID NO: 4683 - RNA, 20 nt, synthetic construct
  misc_feature 1..20: note = HBV-targeting guide sequence portion
  source 1..20: mol_type = other RNA
gtttactgttcctgaactgg

SEQ ID NO: 4684 - RNA, 20 nt, synthetic construct
  misc_feature 1..20: note = HBV-targeting guide sequence portion
  source 1..20: mol_type = other RNA
gtttcacatttcttgtctta

SEQ ID NO: 4685 - RNA, 20 nt, synthetic construct
  misc_feature 1..20: note = HBV-targeting guide sequence portion
  source 1..20: mol_type = other RNA
gtttcagaaaactcccggtt

SEQ ID NO: 4686 - RNA, 20 nt, synthetic construct
  misc_feature 1..20: note = HBV-targeting guide sequence portion
  source 1..20: mol_type = other RNA
gtttccatccgaaggttttg

SEQ ID NO: 4687 - RNA, 20 nt, synthetic construct
  misc_feature 1..20: note = HBV-targeting guide sequence portion
  source 1..20: mol_type = other RNA
gtttcccgtctgtcctctaa

SEQ ID NO: 4688 - RNA, 20 nt, synthetic construct
  misc_feature 1..20: note = HBV-targeting guide sequence portion
  source 1..20: mol_type = other RNA
gtttctcagaggtggagaca

SEQ ID NO: 4689 - RNA, 20 nt, synthetic construct
  misc_feature 1..20: note = HBV-targeting guide sequence portion
  source 1..20: mol_type = other RNA
gtttctcttccaaaagtaag

SEQ ID NO: 4690 - RNA, 20 nt, synthetic construct
  misc_feature 1..20: note = HBV-targeting guide sequence portion
  source 1..20: mol_type = other RNA
gtttctcttggctcagttta

SEQ ID NO: 4691 - RNA, 20 nt, synthetic construct
  misc_feature 1..20: note = HBV-targeting guide sequence portion
  source 1..20: mol_type = other RNA
gtttgcattatgccctgagc

SEQ ID NO: 4692 - RNA, 20 nt, synthetic construct
  misc_feature 1..20: note = HBV-targeting guide sequence portion
  source 1..20: mol_type = other RNA
gtttgctccagaccggctgc

SEQ ID NO: 4693 - RNA, 20 nt, synthetic construct
  misc_feature 1..20: note = HBV-targeting guide sequence portion
  source 1..20: mol_type = other RNA
gtttgctctgaaggctgggt

SEQ ID NO: 4694 - RNA, 20 nt, synthetic construct
  misc_feature 1..20: note = HBV-targeting guide sequence portion
  source 1..20: mol_type = other RNA
gtttgctgatgcaaccccca

SEQ ID NO: 4695 - RNA, 20 nt, synthetic construct
  misc_feature 1..20: note = HBV-targeting guide sequence portion
  source 1..20: mol_type = other RNA
gtttggaagtaatgattaac

SEQ ID NO: 4696 - RNA, 20 nt, synthetic construct
  misc_feature 1..20: note = HBV-targeting guide sequence portion
  source 1..20: mol_type = other RNA
gtttggctttcagttatatg

SEQ ID NO: 4697 - RNA, 20 nt, synthetic construct
  misc_feature 1..20: note = HBV-targeting guide sequence portion
  source 1..20: mol_type = other RNA
gtttgtaggcccgcttacag

SEQ ID NO: 4698 - RNA, 20 nt, synthetic construct
  misc_feature 1..20: note = HBV-targeting guide sequence portion
  source 1..20: mol_type = other RNA
gtttgtttaaagactgggag

SEQ ID NO: 4699 - RNA, 20 nt, synthetic construct
  misc_feature 1..20: note = HBV-targeting guide sequence portion
  source 1..20: mol_type = other RNA
gttttatataagagagtgtc

SEQ ID NO: 4700 - RNA, 20 nt, synthetic construct
  misc_feature 1..20: note = HBV-targeting guide sequence portion
  source 1..20: mol_type = other RNA
gttttatcatcttcctcttc

SEQ ID NO: 4701 - RNA, 20 nt, synthetic construct
  misc_feature 1..20: note = HBV-targeting guide sequence portion
  source 1..20: mol_type = other RNA
gttttatcctaaattcacca

SEQ ID NO: 4702 - RNA, 20 nt, synthetic construct
  misc_feature 1..20: note = HBV-targeting guide sequence portion
  source 1..20: mol_type = other RNA
gttttccaatgagggttaaa

SEQ ID NO: 4703 - RNA, 20 nt, synthetic construct
  misc_feature 1..20: note = HBV-targeting guide sequence portion
  source 1..20: mol_type = other RNA
gttttccttgttgacaagaa

SEQ ID NO: 4704 - RNA, 20 nt, synthetic construct
  misc_feature 1..20: note = HBV-targeting guide sequence portion
  source 1..20: mol_type = other RNA
gttttctgaaacattctttg

SEQ ID NO: 4705 - RNA, 20 nt, synthetic construct
  misc_feature 1..20: note = HBV-targeting guide sequence portion
  source 1..20: mol_type = other RNA
gttttgctcgcagccggtct

SEQ ID NO: 4706 - RNA, 20 nt, synthetic construct
  misc_feature 1..20: note = HBV-targeting guide sequence portion
  source 1..20: mol_type = other RNA
gttttgctgccccttttaca

SEQ ID NO: 4707 - RNA, 20 nt, synthetic construct
  misc_feature 1..20: note = HBV-targeting guide sequence portion
  source 1..20: mol_type = other RNA
gttttgtacagcaacaggag

SEQ ID NO: 4708 - RNA, 20 nt, synthetic construct
  misc_feature 1..20: note = HBV-targeting guide sequence portion
  source 1..20: mol_type = other RNA
gttttgttagggtttaaatg

SEQ ID NO: 4709 - RNA, 20 nt, synthetic construct
  misc_feature 1..20: note = HBV-targeting guide sequence portion
  source 1..20: mol_type = other RNA
gtttttgccttctgacttct

SEQ ID NO: 4710 - RNA, 20 nt, synthetic construct
  misc_feature 1..20: note = HBV-targeting guide sequence portion
  source 1..20: mol_type = other RNA
taaaacacccgccttccata

SEQ ID NO: 4711 - RNA, 20 nt, synthetic construct
  misc_feature 1..20: note = HBV-targeting guide sequence portion
  source 1..20: mol_type = other RNA
taaaacctagcaggcataat

SEQ ID NO: 4712 - RNA, 20 nt, synthetic construct
  misc_feature 1..20: note = HBV-targeting guide sequence portion
  source 1..20: mol_type = other RNA
taaaacgccgcagacacatc

SEQ ID NO: 4713 - RNA, 20 nt, synthetic construct
  misc_feature 1..20: note = HBV-targeting guide sequence portion
  source 1..20: mol_type = other RNA
taaaaggggcagcaaaaccc

SEQ ID NO: 4714 - RNA, 20 nt, synthetic construct
  misc_feature 1..20: note = HBV-targeting guide sequence portion
  source 1..20: mol_type = other RNA
taaaatttcccaccttatga

SEQ ID NO: 4715 - RNA, 20 nt, synthetic construct
  misc_feature 1..20: note = HBV-targeting guide sequence portion
  source 1..20: mol_type = other RNA
taaacaaacagtctttgaag

SEQ ID NO: 4716 - RNA, 20 nt, synthetic construct
  misc_feature 1..20: note = HBV-targeting guide sequence portion
  source 1..20: mol_type = other RNA
taaacaaaggacgtcccgcg

SEQ ID NO: 4717 - RNA, 20 nt, synthetic construct
  misc_feature 1..20: note = HBV-targeting guide sequence portion
  source 1..20: mol_type = other RNA
taaacaatacctgaaccttt

SEQ ID NO: 4718 - RNA, 20 nt, synthetic construct
  misc_feature 1..20: note = HBV-targeting guide sequence portion
  source 1..20: mol_type = other RNA
taaaccctaacaaaacaaag

SEQ ID NO: 4719 - RNA, 20 nt, synthetic construct
  misc_feature 1..20: note = HBV-targeting guide sequence portion
  source 1..20: mol_type = other RNA
taaaccctgttccgactact

SEQ ID NO: 4720 - RNA, 20 nt, synthetic construct
  misc_feature 1..20: note = HBV-targeting guide sequence portion
  source 1..20: mol_type = other RNA
taaaccttattatccagaac

SEQ ID NO: 4721 - RNA, 20 nt, synthetic construct
  misc_feature 1..20: note = HBV-targeting guide sequence portion
  source 1..20: mol_type = other RNA
taaactgagccaagagaaac

SEQ ID NO: 4722 - RNA, 20 nt, synthetic construct
  misc_feature 1..20: note = HBV-targeting guide sequence portion
  source 1..20: mol_type = other RNA
taaagaatttggagctactg

SEQ ID NO: 4723 - RNA, 20 nt, synthetic construct
  misc_feature 1..20: note = HBV-targeting guide sequence portion
  source 1..20: mol_type = other RNA
taaagacaggtacagtagaa

SEQ ID NO: 4724 - RNA, 20 nt, synthetic construct
  misc_feature 1..20: note = HBV-targeting guide sequence portion
  source 1..20: mol_type = other RNA
taaagactgggaggagttgg

SEQ ID NO: 4725 - RNA, 20 nt, synthetic construct
  misc_feature 1..20: note = HBV-targeting guide sequence portion
  source 1..20: mol_type = other RNA
taaagagaggtgcgccccgt

SEQ ID NO: 4726 - RNA, 20 nt, synthetic construct
  misc_feature 1..20: note = HBV-targeting guide sequence portion
  source 1..20: mol_type = other RNA
taaagcaggataaccacatt

SEQ ID NO: 4727 - RNA, 20 nt, synthetic construct
  misc_feature 1..20: note = HBV-targeting guide sequence portion
  source 1..20: mol_type = other RNA
taaagccacccaaggcacag

SEQ ID NO: 4728 - RNA, 20 nt, synthetic construct
  misc_feature 1..20: note = HBV-targeting guide sequence portion
  source 1..20: mol_type = other RNA
taaagccccgtaaaatttcc

SEQ ID NO: 4729 - RNA, 20 nt, synthetic construct
  misc_feature 1..20: note = HBV-targeting guide sequence portion
  source 1..20: mol_type = other RNA
taaagggactcaagatgctg

SEQ ID NO: 4730 - RNA, 20 nt, synthetic construct
  misc_feature 1..20: note = HBV-targeting guide sequence portion
  source 1..20: mol_type = other RNA
taaaggttcaggtattgttt

SEQ ID NO: 4731 - RNA, 20 nt, synthetic construct
  misc_feature 1..20: note = HBV-targeting guide sequence portion
  source 1..20: mol_type = other RNA
taaagttcagacaactattg

SEQ ID NO: 4732 - RNA, 20 nt, synthetic construct
  misc_feature 1..20: note = HBV-targeting guide sequence portion
  source 1..20: mol_type = other RNA
taaatagtgtctagtttgga

SEQ ID NO: 4733 - RNA, 20 nt, synthetic construct
  misc_feature 1..20: note = HBV-targeting guide sequence portion
  source 1..20: mol_type = other RNA
taaatgtacacccaaagaca

SEQ ID NO: 4734 - RNA, 20 nt, synthetic construct
  misc_feature 1..20: note = HBV-targeting guide sequence portion
  source 1..20: mol_type = other RNA
taaattagtacccacccagg

SEQ ID NO: 4735 - RNA, 20 nt, synthetic construct
  misc_feature 1..20: note = HBV-targeting guide sequence portion
  source 1..20: mol_type = other RNA
taaattcaccaaatacttgc

SEQ ID NO: 4736 - RNA, 20 nt, synthetic construct
  misc_feature 1..20: note = HBV-targeting guide sequence portion
  source 1..20: mol_type = other RNA
taaattggtctgcgcaccag

SEQ ID NO: 4737 - RNA, 20 nt, synthetic construct
  misc_feature 1..20: note = HBV-targeting guide sequence portion
  source 1..20: mol_type = other RNA
taacaaaacaaagagatggg

SEQ ID NO: 4738 - RNA, 20 nt, synthetic construct
  misc_feature 1..20: note = HBV-targeting guide sequence portion
  source 1..20: mol_type = other RNA
taacaacacaagtctccgga

SEQ ID NO: 4739 - RNA, 20 nt, synthetic construct
  misc_feature 1..20: note = HBV-targeting guide sequence portion
  source 1..20: mol_type = other RNA
taacacgagcaggggtccta

SEQ ID NO: 4740 - RNA, 20 nt, synthetic construct
  misc_feature 1..20: note = HBV-targeting guide sequence portion
  source 1..20: mol_type = other RNA
taacagcggtataaagggac

SEQ ID NO: 4741 - RNA, 20 nt, synthetic construct
  misc_feature 1..20: note = HBV-targeting guide sequence portion
  source 1..20: mol_type = other RNA
taacaggcctattgattgga

SEQ ID NO: 4742 - RNA, 20 nt, synthetic construct
  misc_feature 1..20: note = HBV-targeting guide sequence portion
  source 1..20: mol_type = other RNA
taacattgagatccccgaga

SEQ ID NO: 4743 - RNA, 20 nt, synthetic construct
  misc_feature 1..20: note = HBV-targeting guide sequence portion
  source 1..20: mol_type = other RNA
taaccacattgtgtaaaagg

SEQ ID NO: 4744 - RNA, 20 nt, synthetic construct
  misc_feature 1..20: note = HBV-targeting guide sequence portion
  source 1..20: mol_type = other RNA
taaccaggacaagttggagg

SEQ ID NO: 4745 - RNA, 20 nt, synthetic construct
  misc_feature 1..20: note = HBV-targeting guide sequence portion
  source 1..20: mol_type = other RNA
taaccccatctctttgtttt

SEQ ID NO: 4746 - RNA, 20 nt, synthetic construct
  misc_feature 1..20: note = HBV-targeting guide sequence portion
  source 1..20: mol_type = other RNA
taaccctcattggaaaacac

SEQ ID NO: 4747 - RNA, 20 nt, synthetic construct
  misc_feature 1..20: note = HBV-targeting guide sequence portion
  source 1..20: mol_type = other RNA
taaccgggagttttctgaaa

SEQ ID NO: 4748 - RNA, 20 nt, synthetic construct
  misc_feature 1..20: note = HBV-targeting guide sequence portion
  source 1..20: mol_type = other RNA
taactagatgttctggataa

SEQ ID NO: 4749 - RNA, 20 nt, synthetic construct
  misc_feature 1..20: note = HBV-targeting guide sequence portion
  source 1..20: mol_type = other RNA
taactccacagtagctccaa

SEQ ID NO: 4750 - RNA, 20 nt, synthetic construct
  misc_feature 1..20: note = HBV-targeting guide sequence portion
  source 1..20: mol_type = other RNA
taactgaaagccaaacagtg

SEQ ID NO: 4751 - RNA, 20 nt, synthetic construct
  misc_feature 1..20: note = HBV-targeting guide sequence portion
  source 1..20: mol_type = other RNA
taactgactactaggtccct

SEQ ID NO: 4752 - RNA, 20 nt, synthetic construct
  misc_feature 1..20: note = HBV-targeting guide sequence portion
  source 1..20: mol_type = other RNA
taactgtaagcgggcctaca

SEQ ID NO: 4753 - RNA, 20 nt, synthetic construct
  misc_feature 1..20: note = HBV-targeting guide sequence portion
  source 1..20: mol_type = other RNA
taagacaagaaatgtgaaac

SEQ ID NO: 4754 - RNA, 20 nt, synthetic construct
  misc_feature 1..20: note = HBV-targeting guide sequence portion
  source 1..20: mol_type = other RNA
taagaccttgggcaagaatt

SEQ ID NO: 4755 - RNA, 20 nt, synthetic construct
  misc_feature 1..20: note = HBV-targeting guide sequence portion
  source 1..20: mol_type = other RNA
taagagaataaccccatctc

SEQ ID NO: 4756 - RNA, 20 nt, synthetic construct
  misc_feature 1..20: note = HBV-targeting guide sequence portion
  source 1..20: mol_type = other RNA
taagagagtgtcaacacata

SEQ ID NO: 4757 - RNA, 20 nt, synthetic construct
  misc_feature 1..20: note = HBV-targeting guide sequence portion
  source 1..20: mol_type = other RNA
taagaggactcttggactct

SEQ ID NO: 4758 - RNA, 20 nt, synthetic construct
  misc_feature 1..20: note = HBV-targeting guide sequence portion
  source 1..20: mol_type = other RNA
taagcaggctttcacttttt

SEQ ID NO: 4759 - RNA, 20 nt, synthetic construct
  misc_feature 1..20: note = HBV-targeting guide sequence portion
  source 1..20: mol_type = other RNA
taagcgggcctacaaactgt

SEQ ID NO: 4760 - RNA, 20 nt, synthetic construct
  misc_feature 1..20: note = HBV-targeting guide sequence portion
  source 1..20: mol_type = other RNA
taagctggaggagtgcgaat

SEQ ID NO: 4761 - RNA, 20 nt, synthetic construct
  misc_feature 1..20: note = HBV-targeting guide sequence portion
  source 1..20: mol_type = other RNA
taagggtattaaaccttatt

SEQ ID NO: 4762 - RNA, 20 nt, synthetic construct
  misc_feature 1..20: note = HBV-targeting guide sequence portion
  source 1..20: mol_type = other RNA
taaggtgggaaattttacgg

SEQ ID NO: 4763 - RNA, 20 nt, synthetic construct
  misc_feature 1..20: note = HBV-targeting guide sequence portion
  source 1..20: mol_type = other RNA
taaggtttaatacccttatc

SEQ ID NO: 4764 - RNA, 20 nt, synthetic construct
  misc_feature 1..20: note = HBV-targeting guide sequence portion
  source 1..20: mol_type = other RNA
taagttggcgaaaaagtgaa

SEQ ID NO: 4765 - RNA, 20 nt, synthetic construct
  misc_feature 1..20: note = HBV-targeting guide sequence portion
  source 1..20: mol_type = other RNA
taataaggtttaataccctt

SEQ ID NO: 4766 - RNA, 20 nt, synthetic construct
  misc_feature 1..20: note = HBV-targeting guide sequence portion
  source 1..20: mol_type = other RNA
taatacccttatccaagggc

SEQ ID NO: 4767 - RNA, 20 nt, synthetic construct
  misc_feature 1..20: note = HBV-targeting guide sequence portion
  source 1..20: mol_type = other RNA
taatatacatctacaccaag

SEQ ID NO: 4768 - RNA, 20 nt, synthetic construct
  misc_feature 1..20: note = HBV-targeting guide sequence portion
  source 1..20: mol_type = other RNA
taatatcttggtgtagatgt

SEQ ID NO: 4769 - RNA, 20 nt, synthetic construct
  misc_feature 1..20: note = HBV-targeting guide sequence portion
  source 1..20: mol_type = other RNA
taatcaatttcaaccgtctt

SEQ ID NO: 4770 - RNA, 20 nt, synthetic construct
  misc_feature 1..20: note = HBV-targeting guide sequence portion
  source 1..20: mol_type = other RNA
taatcatctcttgttcatgt

SEQ ID NO: 4771 - RNA, 20 nt, synthetic construct
  misc_feature 1..20: note = HBV-targeting guide sequence portion
  source 1..20: mol_type = other RNA
taatcattacttccaaacta

SEQ ID NO: 4772 - RNA, 20 nt, synthetic construct
  misc_feature 1..20: note = HBV-targeting guide sequence portion
  source 1..20: mol_type = other RNA
taatctaatctcctccccca

SEQ ID NO: 4773 - RNA, 20 nt, synthetic construct
  misc_feature 1..20: note = HBV-targeting guide sequence portion
  source 1..20: mol_type = other RNA
taatctcctcccccaactcc

SEQ ID NO: 4774 - RNA, 20 nt, synthetic construct
  misc_feature 1..20: note = HBV-targeting guide sequence portion
  source 1..20: mol_type = other RNA
taatgactctagctacctgg

SEQ ID NO: 4775 - RNA, 20 nt, synthetic construct
  misc_feature 1..20: note = HBV-targeting guide sequence portion
  source 1..20: mol_type = other RNA
taatgagaaaagacggttga

SEQ ID NO: 4776 - RNA, 20 nt, synthetic construct
  misc_feature 1..20: note = HBV-targeting guide sequence portion
  source 1..20: mol_type = other RNA
taatgatctttgtactagga

SEQ ID NO: 4777 - RNA, 20 nt, synthetic construct
  misc_feature 1..20: note = HBV-targeting guide sequence portion
  source 1..20: mol_type = other RNA
taatgattaactagatgttc

SEQ ID NO: 4778 - RNA, 20 nt, synthetic construct
  misc_feature 1..20: note = HBV-targeting guide sequence portion
  source 1..20: mol_type = other RNA
taatgcaaaccttgccagca

SEQ ID NO: 4779 - RNA, 20 nt, synthetic construct
  misc_feature 1..20: note = HBV-targeting guide sequence portion
  source 1..20: mol_type = other RNA
taatgcccttgtatgcatgt

SEQ ID NO: 4780 - RNA, 20 nt, synthetic construct
  misc_feature 1..20: note = HBV-targeting guide sequence portion
  source 1..20: mol_type = other RNA
taattccaggatcatcaacc

SEQ ID NO: 4781 - RNA, 20 nt, synthetic construct
  misc_feature 1..20: note = HBV-targeting guide sequence portion
  source 1..20: mol_type = other RNA
taatttagaagatcaagcat

SEQ ID NO: 4782 - RNA, 20 nt, synthetic construct
  misc_feature 1..20: note = HBV-targeting guide sequence portion
  source 1..20: mol_type = other RNA
taatttcatgggctatgtca

SEQ ID NO: 4783 - RNA, 20 nt, synthetic construct
  misc_feature 1..20: note = HBV-targeting guide sequence portion
  source 1..20: mol_type = other RNA
tacaaaaccttcggatggaa

SEQ ID NO: 4784 - RNA, 20 nt, synthetic construct
  misc_feature 1..20: note = HBV-targeting guide sequence portion
  source 1..20: mol_type = other RNA
tacaaactgttcacattttt

SEQ ID NO: 4785 - RNA, 20 nt, synthetic construct
  misc_feature 1..20: note = HBV-targeting guide sequence portion
  source 1..20: mol_type = other RNA
tacaaagatcattaatctaa

SEQ ID NO: 4786 - RNA, 20 nt, synthetic construct
  misc_feature 1..20: note = HBV-targeting guide sequence portion
  source 1..20: mol_type = other RNA
tacaaggcctttctgtgtaa

SEQ ID NO: 4787 - RNA, 20 nt, synthetic construct
  misc_feature 1..20: note = HBV-targeting guide sequence portion
  source 1..20: mol_type = other RNA
tacaagggcattaaagcagg

SEQ ID NO: 4788 - RNA, 20 nt, synthetic construct
  misc_feature 1..20: note = HBV-targeting guide sequence portion
  source 1..20: mol_type = other RNA
tacacaaaatcaaagaatgt

SEQ ID NO: 4789 - RNA, 20 nt, synthetic construct
  misc_feature 1..20: note = HBV-targeting guide sequence portion
  source 1..20: mol_type = other RNA
tacacaatgtggttatcctg

SEQ ID NO: 4790 - RNA, 20 nt, synthetic construct
  misc_feature 1..20: note = HBV-targeting guide sequence portion
  source 1..20: mol_type = other RNA
tacacactctatggaaggcg

SEQ ID NO: 4791 - RNA, 20 nt, synthetic construct
  misc_feature 1..20: note = HBV-targeting guide sequence portion
  source 1..20: mol_type = other RNA
tacacagaaaggccttgtaa

SEQ ID NO: 4792 - RNA, 20 nt, synthetic construct
  misc_feature 1..20: note = HBV-targeting guide sequence portion
  source 1..20: mol_type = other RNA
tacaccaagatattatcaaa

SEQ ID NO: 4793 - RNA, 20 nt, synthetic construct
  misc_feature 1..20: note = HBV-targeting guide sequence portion
  source 1..20: mol_type = other RNA
tacacccaaagacaaaagaa

SEQ ID NO: 4794 - RNA, 20 nt, synthetic construct
  misc_feature 1..20: note = HBV-targeting guide sequence portion
  source 1..20: mol_type = other RNA
tacagacttggcccccaata

SEQ ID NO: 4795 - RNA, 20 nt, synthetic construct
  misc_feature 1..20: note = HBV-targeting guide sequence portion
  source 1..20: mol_type = other RNA
tacagagctgcggcggtatc

SEQ ID NO: 4796 - RNA, 20 nt, synthetic construct
  misc_feature 1..20: note = HBV-targeting guide sequence portion
  source 1..20: mol_type = other RNA
tacagcaacaggagggatac

SEQ ID NO: 4797 - RNA, 20 nt, synthetic construct
  misc_feature 1..20: note = HBV-targeting guide sequence portion
  source 1..20: mol_type = other RNA
tacagcatcttgagtccctt

SEQ ID NO: 4798 - RNA, 20 nt, synthetic construct
  misc_feature 1..20: note = HBV-targeting guide sequence portion
  source 1..20: mol_type = other RNA
tacagcatggggcagaatct

SEQ ID NO: 4799 - RNA, 20 nt, synthetic construct
  misc_feature 1..20: note = HBV-targeting guide sequence portion
  source 1..20: mol_type = other RNA
tacagcctcctagtacaaag

SEQ ID NO: 4800 - RNA, 20 nt, synthetic construct
  misc_feature 1..20: note = HBV-targeting guide sequence portion
  source 1..20: mol_type = other RNA
tacaggcctctcactctggg

SEQ ID NO: 4801 - RNA, 20 nt, synthetic construct
  misc_feature 1..20: note = HBV-targeting guide sequence portion
  source 1..20: mol_type = other RNA
tacaggcggggttttccttg

SEQ ID NO: 4802 - RNA, 20 nt, synthetic construct
  misc_feature 1..20: note = HBV-targeting guide sequence portion
  source 1..20: mol_type = other RNA
tacaggtgcagtttccatcc

SEQ ID NO: 4803 - RNA, 20 nt, synthetic construct
  misc_feature 1..20: note = HBV-targeting guide sequence portion
  source 1..20: mol_type = other RNA
tacagtagaagaataaagcc

SEQ ID NO: 4804 - RNA, 20 nt, synthetic construct
  misc_feature 1..20: note = HBV-targeting guide sequence portion
  source 1..20: mol_type = other RNA
tacagttaatgagaaaagac

SEQ ID NO: 4805 - RNA, 20 nt, synthetic construct
  misc_feature 1..20: note = HBV-targeting guide sequence portion
  source 1..20: mol_type = other RNA
tacataagaggactcttgga

SEQ ID NO: 4806 - RNA, 20 nt, synthetic construct
  misc_feature 1..20: note = HBV-targeting guide sequence portion
  source 1..20: mol_type = other RNA
tacatagaggttccttgagc

SEQ ID NO: 4807 - RNA, 20 nt, synthetic construct
  misc_feature 1..20: note = HBV-targeting guide sequence portion
  source 1..20: mol_type = other RNA
tacatcgttcccatggctgc

SEQ ID NO: 4808 - RNA, 20 nt, synthetic construct
  misc_feature 1..20: note = HBV-targeting guide sequence portion
  source 1..20: mol_type = other RNA
tacatctacaccaagatatt

SEQ ID NO: 4809 - RNA, 20 nt, synthetic construct
  misc_feature 1..20: note = HBV-targeting guide sequence portion
  source 1..20: mol_type = other RNA
tacatgcatacaagggcatt

SEQ ID NO: 4810 - RNA, 20 nt, synthetic construct
  misc_feature 1..20: note = HBV-targeting guide sequence portion
  source 1..20: mol_type = other RNA
tacatttaaaccctaacaaa

SEQ ID NO: 4811 - RNA, 20 nt, synthetic construct
  misc_feature 1..20: note = HBV-targeting guide sequence portion
  source 1..20: mol_type = other RNA
taccaatcgccagtcaggac

SEQ ID NO: 4812 - RNA, 20 nt, synthetic construct
  misc_feature 1..20: note = HBV-targeting guide sequence portion
  source 1..20: mol_type = other RNA
taccaattttcttttgtctt

SEQ ID NO: 4813 - RNA, 20 nt, synthetic construct
  misc_feature 1..20: note = HBV-targeting guide sequence portion
  source 1..20: mol_type = other RNA
taccacatcatccatataac

SEQ ID NO: 4814 - RNA, 20 nt, synthetic construct
  misc_feature 1..20: note = HBV-targeting guide sequence portion
  source 1..20: mol_type = other RNA
tacccacccaggtagctaga

SEQ ID NO: 4815 - RNA, 20 nt, synthetic construct
  misc_feature 1..20: note = HBV-targeting guide sequence portion
  source 1..20: mol_type = other RNA
taccccgctgtctccacctc

SEQ ID NO: 4816 - RNA, 20 nt, synthetic construct
  misc_feature 1..20: note = HBV-targeting guide sequence portion
  source 1..20: mol_type = other RNA
taccccgttgccaggcaacg

SEQ ID NO: 4817 - RNA, 20 nt, synthetic construct
  misc_feature 1..20: note = HBV-targeting guide sequence portion
  source 1..20: mol_type = other RNA
tacccttatccaagggcaag

SEQ ID NO: 4818 - RNA, 20 nt, synthetic construct
  misc_feature 1..20: note = HBV-targeting guide sequence portion
  source 1..20: mol_type = other RNA
taccgcagagtctagactcg

SEQ ID NO: 4819 - RNA, 20 nt, synthetic construct
  misc_feature 1..20: note = HBV-targeting guide sequence portion
  source 1..20: mol_type = other RNA
taccgccgcagctctgtatc

SEQ ID NO: 4820 - RNA, 20 nt, synthetic construct
  misc_feature 1..20: note = HBV-targeting guide sequence portion
  source 1..20: mol_type = other RNA
taccgctgttaccaattttc

SEQ ID NO: 4821 - RNA, 20 nt, synthetic construct
  misc_feature 1..20: note = HBV-targeting guide sequence portion
  source 1..20: mol_type = other RNA
taccgtgtgtcttggccaaa

SEQ ID NO: 4822 - RNA, 20 nt, synthetic construct
  misc_feature 1..20: note = HBV-targeting guide sequence portion
  source 1..20: mol_type = other RNA
tacctgaacctttaccccgt

SEQ ID NO: 4823 - RNA, 20 nt, synthetic construct
  misc_feature 1..20: note = HBV-targeting guide sequence portion
  source 1..20: mol_type = other RNA
tacctgggtgggtactaatt

SEQ ID NO: 4824 - RNA, 20 nt, synthetic construct
  misc_feature 1..20: note = HBV-targeting guide sequence portion
  source 1..20: mol_type = other RNA
tacctgtctttaaccctcat

SEQ ID NO: 4825 - RNA, 20 nt, synthetic construct
  misc_feature 1..20: note = HBV-targeting guide sequence portion
  source 1..20: mol_type = other RNA
taccttgatagtccagaaga

SEQ ID NO: 4826 - RNA, 20 nt, synthetic construct
  misc_feature 1..20: note = HBV-targeting guide sequence portion
  source 1..20: mol_type = other RNA
taccttgttggcgtctggcc

SEQ ID NO: 4827 - RNA, 20 nt, synthetic construct
  misc_feature 1..20: note = HBV-targeting guide sequence portion
  source 1..20: mol_type = other RNA
tacgaaccactgaacaaatg

SEQ ID NO: 4828 - RNA, 20 nt, synthetic construct
  misc_feature 1..20: note = HBV-targeting guide sequence portion
  source 1..20: mol_type = other RNA
tacgagatcttctagatacc

SEQ ID NO: 4829 - RNA, 20 nt, synthetic construct
  misc_feature 1..20: note = HBV-targeting guide sequence portion
  source 1..20: mol_type = other RNA
tacgcggactccccgtctgt

SEQ ID NO: 4830 - RNA, 20 nt, synthetic construct
  misc_feature 1..20: note = HBV-targeting guide sequence portion
  source 1..20: mol_type = other RNA
tacggaaggaaagaagtcag

SEQ ID NO: 4831 - RNA, 20 nt, synthetic construct
  misc_feature 1..20: note = HBV-targeting guide sequence portion
  source 1..20: mol_type = other RNA
tacggggctttattcttcta

SEQ ID NO: 4832 - RNA, 20 nt, synthetic construct
  misc_feature 1..20: note = HBV-targeting guide sequence portion
  source 1..20: mol_type = other RNA
tacgtcccgtcggcgctgaa

SEQ ID NO: 4833 - RNA, 20 nt, synthetic construct
  misc_feature 1..20: note = HBV-targeting guide sequence portion
  source 1..20: mol_type = other RNA
tactaacattgagatccccg

SEQ ID NO: 4834 - RNA, 20 nt, synthetic construct
  misc_feature 1..20: note = HBV-targeting guide sequence portion
  source 1..20: mol_type = other RNA
tactaatttagaagatcaag

SEQ ID NO: 4835 - RNA, 20 nt, synthetic construct
  misc_feature 1..20: note = HBV-targeting guide sequence portion
  source 1..20: mol_type = other RNA
tactaggaggctgtaggcat

SEQ ID NO: 4836 - RNA, 20 nt, synthetic construct
  misc_feature 1..20: note = HBV-targeting guide sequence portion
  source 1..20: mol_type = other RNA
tactaggtccctagatgctt

SEQ ID NO: 4837 - RNA, 20 nt, synthetic construct
  misc_feature 1..20: note = HBV-targeting guide sequence portion
  source 1..20: mol_type = other RNA
tactagtgccatttgttcag

SEQ ID NO: 4838 - RNA, 20 nt, synthetic construct
  misc_feature 1..20: note = HBV-targeting guide sequence portion
  source 1..20: mol_type = other RNA
tactctaggaccgtttctct

SEQ ID NO: 4839 - RNA, 20 nt, synthetic construct
  misc_feature 1..20: note = HBV-targeting guide sequence portion
  source 1..20: mol_type = other RNA
tactctcgtttttgccttct

SEQ ID NO: 4840 - RNA, 20 nt, synthetic construct
  misc_feature 1..20: note = HBV-targeting guide sequence portion
  source 1..20: mol_type = other RNA
tactgcactcaggcaagcaa

SEQ ID NO: 4841 - RNA, 20 nt, synthetic construct
  misc_feature 1..20: note = HBV-targeting guide sequence portion
  source 1..20: mol_type = other RNA
tactgcctctcacatatcgt

SEQ ID NO: 4842 - RNA, 20 nt, synthetic construct
  misc_feature 1..20: note = HBV-targeting guide sequence portion
  source 1..20: mol_type = other RNA
tactgcggaactcctagccg

SEQ ID NO: 4843 - RNA, 20 nt, synthetic construct
  misc_feature 1..20: note = HBV-targeting guide sequence portion
  source 1..20: mol_type = other RNA
tactgtacctgtctttaacc

SEQ ID NO: 4844 - RNA, 20 nt, synthetic construct
  misc_feature 1..20: note = HBV-targeting guide sequence portion
  source 1..20: mol_type = other RNA
tactgtggagttactctcgt

SEQ ID NO: 4845 - RNA, 20 nt, synthetic construct
  misc_feature 1..20: note = HBV-targeting guide sequence portion
  source 1..20: mol_type = other RNA
tactgttcaagcctccaagc

SEQ ID NO: 4846 - RNA, 20 nt, synthetic construct
  misc_feature 1..20: note = HBV-targeting guide sequence portion
  source 1..20: mol_type = other RNA
tactgttcctgaactggagc

SEQ ID NO: 4847 - RNA, 20 nt, synthetic construct
  misc_feature 1..20: note = HBV-targeting guide sequence portion
  source 1..20: mol_type = other RNA
tacttcaaagactgtttgtt

SEQ ID NO: 4848 - RNA, 20 nt, synthetic construct
  misc_feature 1..20: note = HBV-targeting guide sequence portion
  source 1..20: mol_type = other RNA
tacttccaaactagacacta

SEQ ID NO: 4849 - RNA, 20 nt, synthetic construct
  misc_feature 1..20: note = HBV-targeting guide sequence portion
  source 1..20: mol_type = other RNA
tacttgcccttggataaggg

SEQ ID NO: 4850 - RNA, 20 nt, synthetic construct
  misc_feature 1..20: note = HBV-targeting guide sequence portion
  source 1..20: mol_type = other RNA
tacttttggaagagaaacgg

SEQ ID NO: 4851 - RNA, 20 nt, synthetic construct
  misc_feature 1..20: note = HBV-targeting guide sequence portion
  source 1..20: mol_type = other RNA
tagaaaattgagagaagtcc

SEQ ID NO: 4852 - RNA, 20 nt, synthetic construct
  misc_feature 1..20: note = HBV-targeting guide sequence portion
  source 1..20: mol_type = other RNA
tagaagaagaactccctcgc

SEQ ID NO: 4853 - RNA, 20 nt, synthetic construct
  misc_feature 1..20: note = HBV-targeting guide sequence portion
  source 1..20: mol_type = other RNA
tagaagaataaagccccgta

SEQ ID NO: 4854 - RNA, 20 nt, synthetic construct
  misc_feature 1..20: note = HBV-targeting guide sequence portion
  source 1..20: mol_type = other RNA
tagaagatcaagcatctagg

SEQ ID NO: 4855 - RNA, 20 nt, synthetic construct
  misc_feature 1..20: note = HBV-targeting guide sequence portion
  source 1..20: mol_type = other RNA
tagaagatctcgtacggaag

SEQ ID NO: 4856 - RNA, 20 nt, synthetic construct
  misc_feature 1..20: note = HBV-targeting guide sequence portion
  source 1..20: mol_type = other RNA
tagacactatttacacactc

SEQ ID NO: 4857 - RNA, 20 nt, synthetic construct
  misc_feature 1..20: note = HBV-targeting guide sequence portion
  source 1..20: mol_type = other RNA
tagaccaccaaatgccccta

SEQ ID NO: 4858 - RNA, 20 nt, synthetic construct
  misc_feature 1..20: note = HBV-targeting guide sequence portion
  source 1..20: mol_type = other RNA
tagacgacgaggcaggtccc

SEQ ID NO: 4859 - RNA, 20 nt, synthetic construct
  misc_feature 1..20: note = HBV-targeting guide sequence portion
  source 1..20: mol_type = other RNA
tagactcgtggtggacttct

SEQ ID NO: 4860 - RNA, 20 nt, synthetic construct
  misc_feature 1..20: note = HBV-targeting guide sequence portion
  source 1..20: mol_type = other RNA
tagactctgcggtattgtga

SEQ ID NO: 4861 - RNA, 20 nt, synthetic construct
  misc_feature 1..20: note = HBV-targeting guide sequence portion
  source 1..20: mol_type = other RNA
tagaggacagacgggaaaca

SEQ ID NO: 4862 - RNA, 20 nt, synthetic construct
  misc_feature 1..20: note = HBV-targeting guide sequence portion
  source 1..20: mol_type = other RNA
tagaggcaggaggcggattt

SEQ ID NO: 4863 - RNA, 20 nt, synthetic construct
  misc_feature 1..20: note = HBV-targeting guide sequence portion
  source 1..20: mol_type = other RNA
tagaggttccttgagcagga

SEQ ID NO: 4864 - RNA, 20 nt, synthetic construct
  misc_feature 1..20: note = HBV-targeting guide sequence portion
  source 1..20: mol_type = other RNA
tagagtatttggtgtctttt

SEQ ID NO: 4865 - RNA, 20 nt, synthetic construct
  misc_feature 1..20: note = HBV-targeting guide sequence portion
  source 1..20: mol_type = other RNA
tagagtcattagttctcccc

SEQ ID NO: 4866 - RNA, 20 nt, synthetic construct
  misc_feature 1..20: note = HBV-targeting guide sequence portion
  source 1..20: mol_type = other RNA
tagagtgtgtaaatagtgtc

SEQ ID NO: 4867 - RNA, 20 nt, synthetic construct
  misc_feature 1..20: note = HBV-targeting guide sequence portion
  source 1..20: mol_type = other RNA
tagataccgccgcagctctg

SEQ ID NO: 4868 - RNA, 20 nt, synthetic construct
  misc_feature 1..20: note = HBV-targeting guide sequence portion
  source 1..20: mol_type = other RNA
tagatgcttgatcttctaaa

SEQ ID NO: 4869 - RNA, 20 nt, synthetic construct
  misc_feature 1..20: note = HBV-targeting guide sequence portion
  source 1..20: mol_type = other RNA
tagatgtatattaggaaaag

SEQ ID NO: 4870 - RNA, 20 nt, synthetic construct
  misc_feature 1..20: note = HBV-targeting guide sequence portion
  source 1..20: mol_type = other RNA
tagatgttctggataataag

SEQ ID NO: 4871 - RNA, 20 nt, synthetic construct
  misc_feature 1..20: note = HBV-targeting guide sequence portion
  source 1..20: mol_type = other RNA
tagattaatgatctttgtac

SEQ ID NO: 4872 - RNA, 20 nt, synthetic construct
  misc_feature 1..20: note = HBV-targeting guide sequence portion
  source 1..20: mol_type = other RNA
tagattgaatacatgcatac

SEQ ID NO: 4873 - RNA, 20 nt, synthetic construct
  misc_feature 1..20: note = HBV-targeting guide sequence portion
  source 1..20: mol_type = other RNA
tagcagcaggatgaagagga

SEQ ID NO: 4874 - RNA, 20 nt, synthetic construct
  misc_feature 1..20: note = HBV-targeting guide sequence portion
  source 1..20: mol_type = other RNA
tagcagccatgggaacgatg

SEQ ID NO: 4875 - RNA, 20 nt, synthetic construct
  misc_feature 1..20: note = HBV-targeting guide sequence portion
  source 1..20: mol_type = other RNA
tagcaggcataatcaatttc

SEQ ID NO: 4876 - RNA, 20 nt, synthetic construct
  misc_feature 1..20: note = HBV-targeting guide sequence portion
  source 1..20: mol_type = other RNA
tagcccatgaaattaagaga

SEQ ID NO: 4877 - RNA, 20 nt, synthetic construct
  misc_feature 1..20: note = HBV-targeting guide sequence portion
  source 1..20: mol_type = other RNA
tagcccgaatgctccagctc

SEQ ID NO: 4878 - RNA, 20 nt, synthetic construct
  misc_feature 1..20: note = HBV-targeting guide sequence portion
  source 1..20: mol_type = other RNA
tagccgcttgttttgctcgc

SEQ ID NO: 4879 - RNA, 20 nt, synthetic construct
  misc_feature 1..20: note = HBV-targeting guide sequence portion
  source 1..20: mol_type = other RNA
tagcgcctcattctgtgggt

SEQ ID NO: 4880 - RNA, 20 nt, synthetic construct
  misc_feature 1..20: note = HBV-targeting guide sequence portion
  source 1..20: mol_type = other RNA
tagctacctgggtgggtact

SEQ ID NO: 4881 - RNA, 20 nt, synthetic construct
  misc_feature 1..20: note = HBV-targeting guide sequence portion
  source 1..20: mol_type = other RNA
tagctagagtcattagttct

SEQ ID NO: 4882 - RNA, 20 nt, synthetic construct
  misc_feature 1..20: note = HBV-targeting guide sequence portion
  source 1..20: mol_type = other RNA
tagctccaaattctttatat

SEQ ID NO: 4883 - RNA, 20 nt, synthetic construct
  misc_feature 1..20: note = HBV-targeting guide sequence portion
  source 1..20: mol_type = other RNA
tagctcttgttcccaagaat

SEQ ID NO: 4884 - RNA, 20 nt, synthetic construct
  misc_feature 1..20: note = HBV-targeting guide sequence portion
  source 1..20: mol_type = other RNA
taggaaaagagggtgttttc

SEQ ID NO: 4885 - RNA, 20 nt, synthetic construct
  misc_feature 1..20: note = HBV-targeting guide sequence portion
  source 1..20: mol_type = other RNA
taggaatcctgatgtgatgt

SEQ ID NO: 4886 - RNA, 20 nt, synthetic construct
  misc_feature 1..20: note = HBV-targeting guide sequence portion
  source 1..20: mol_type = other RNA
taggaattttccgaaagccc

SEQ ID NO: 4887 - RNA, 20 nt, synthetic construct
  misc_feature 1..20: note = HBV-targeting guide sequence portion
  source 1..20: mol_type = other RNA
taggacatgaacaagagatg

SEQ ID NO: 4888 - RNA, 20 nt, synthetic construct
  misc_feature 1..20: note = HBV-targeting guide sequence portion
  source 1..20: mol_type = other RNA
taggacccctgctcgtgtta

SEQ ID NO: 4889 - RNA, 20 nt, synthetic construct
  misc_feature 1..20: note = HBV-targeting guide sequence portion
  source 1..20: mol_type = other RNA
taggaccgtttctcttccaa

SEQ ID NO: 4890 - RNA, 20 nt, synthetic construct
  misc_feature 1..20: note = HBV-targeting guide sequence portion
  source 1..20: mol_type = other RNA
taggagctggagcattcggg

SEQ ID NO: 4891 - RNA, 20 nt, synthetic construct
  misc_feature 1..20: note = HBV-targeting guide sequence portion
  source 1..20: mol_type = other RNA
taggaggctgtaggcataaa

SEQ ID NO: 4892 - RNA, 20 nt, synthetic construct
  misc_feature 1..20: note = HBV-targeting guide sequence portion
  source 1..20: mol_type = other RNA
taggagttccgcagtatgga

SEQ ID NO: 4893 - RNA, 20 nt, synthetic construct
  misc_feature 1..20: note = HBV-targeting guide sequence portion
  source 1..20: mol_type = other RNA
taggataaaacctagcaggc

SEQ ID NO: 4894 - RNA, 20 nt, synthetic construct
  misc_feature 1..20: note = HBV-targeting guide sequence portion
  source 1..20: mol_type = other RNA
taggataggggcatttggtg

SEQ ID NO: 4895 - RNA, 20 nt, synthetic construct
  misc_feature 1..20: note = HBV-targeting guide sequence portion
  source 1..20: mol_type = other RNA
taggcagaggtgaaaaagtt

SEQ ID NO: 4896 - RNA, 20 nt, synthetic construct
  misc_feature 1..20: note = HBV-targeting guide sequence portion
  source 1..20: mol_type = other RNA
taggcataaattggtctgcg

SEQ ID NO: 4897 - RNA, 20 nt, synthetic construct
  misc_feature 1..20: note = HBV-targeting guide sequence portion
  source 1..20: mol_type = other RNA
taggccatcagcgcatgcgt

SEQ ID NO: 4898 - RNA, 20 nt, synthetic construct
  misc_feature 1..20: note = HBV-targeting guide sequence portion
  source 1..20: mol_type = other RNA
taggcccatatgagtgttga

SEQ ID NO: 4899 - RNA, 20 nt, synthetic construct
  misc_feature 1..20: note = HBV-targeting guide sequence portion
  source 1..20: mol_type = other RNA
taggcccgcttacagttaat

SEQ ID NO: 4900 - RNA, 20 nt, synthetic construct
  misc_feature 1..20: note = HBV-targeting guide sequence portion
  source 1..20: mol_type = other RNA
taggcctgttaaccgggagt

SEQ ID NO: 4901 - RNA, 20 nt, synthetic construct
  misc_feature 1..20: note = HBV-targeting guide sequence portion
  source 1..20: mol_type = other RNA
taggctgccgtcctgactgg

SEQ ID NO: 4902 - RNA, 20 nt, synthetic construct
  misc_feature 1..20: note = HBV-targeting guide sequence portion
  source 1..20: mol_type = other RNA
taggctgtgctgccaactgg

SEQ ID NO: 4903 - RNA, 20 nt, synthetic construct
  misc_feature 1..20: note = HBV-targeting guide sequence portion
  source 1..20: mol_type = other RNA
tagggacctagtagtcagtt

SEQ ID NO: 4904 - RNA, 20 nt, synthetic construct
  misc_feature 1..20: note = HBV-targeting guide sequence portion
  source 1..20: mol_type = other RNA
tagggcatggacattgaccc

SEQ ID NO: 4905 - RNA, 20 nt, synthetic construct
  misc_feature 1..20: note = HBV-targeting guide sequence portion
  source 1..20: mol_type = other RNA
tagggctttcccccactgtt

SEQ ID NO: 4906 - RNA, 20 nt, synthetic construct
  misc_feature 1..20: note = HBV-targeting guide sequence portion
  source 1..20: mol_type = other RNA
taggggacctgcctcgtcgt

SEQ ID NO: 4907 - RNA, 20 nt, synthetic construct
  misc_feature 1..20: note = HBV-targeting guide sequence portion
  source 1..20: mol_type = other RNA
taggggcatttggtggtcta

SEQ ID NO: 4908 - RNA, 20 nt, synthetic construct
  misc_feature 1..20: note = HBV-targeting guide sequence portion
  source 1..20: mol_type = other RNA
tagggggaactaccgtgtgt

SEQ ID NO: 4909 - RNA, 20 nt, synthetic construct
  misc_feature 1..20: note = HBV-targeting guide sequence portion
  source 1..20: mol_type = other RNA
tagggttcaccccaccgcac

SEQ ID NO: 4910 - RNA, 20 nt, synthetic construct
  misc_feature 1..20: note = HBV-targeting guide sequence portion
  source 1..20: mol_type = other RNA
tagggtttaaatgtacaccc

SEQ ID NO: 4911 - RNA, 20 nt, synthetic construct
  misc_feature 1..20: note = HBV-targeting guide sequence portion
  source 1..20: mol_type = other RNA
taggtccctagatgcttgat

SEQ ID NO: 4912 - RNA, 20 nt, synthetic construct
  misc_feature 1..20: note = HBV-targeting guide sequence portion
  source 1..20: mol_type = other RNA
taggttttatcctaaattca

SEQ ID NO: 4913 - RNA, 20 nt, synthetic construct
  misc_feature 1..20: note = HBV-targeting guide sequence portion
  source 1..20: mol_type = other RNA
tagtaaactgagccaagaga

SEQ ID NO: 4914 - RNA, 20 nt, synthetic construct
  misc_feature 1..20: note = HBV-targeting guide sequence portion
  source 1..20: mol_type = other RNA
tagtacaaagatcattaatc

SEQ ID NO: 4915 - RNA, 20 nt, synthetic construct
  misc_feature 1..20: note = HBV-targeting guide sequence portion
  source 1..20: mol_type = other RNA
tagtacccacccaggtagct

SEQ ID NO: 4916 - RNA, 20 nt, synthetic construct
  misc_feature 1..20: note = HBV-targeting guide sequence portion
  source 1..20: mol_type = other RNA
tagtagtcagttatgtcaac

SEQ ID NO: 4917 - RNA, 20 nt, synthetic construct
  misc_feature 1..20: note = HBV-targeting guide sequence portion
  source 1..20: mol_type = other RNA
tagtatcccttggactcata

SEQ ID NO: 4918 - RNA, 20 nt, synthetic construct
  misc_feature 1..20: note = HBV-targeting guide sequence portion
  source 1..20: mol_type = other RNA
tagtcagttatgtcaacact

SEQ ID NO: 4919 - RNA, 20 nt, synthetic construct
  misc_feature 1..20: note = HBV-targeting guide sequence portion
  source 1..20: mol_type = other RNA
tagtccagaagaaccaacaa

SEQ ID NO: 4920 - RNA, 20 nt, synthetic construct
  misc_feature 1..20: note = HBV-targeting guide sequence portion
  source 1..20: mol_type = other RNA
tagtcggaacagggtttact

SEQ ID NO: 4921 - RNA, 20 nt, synthetic construct
  misc_feature 1..20: note = HBV-targeting guide sequence portion
  source 1..20: mol_type = other RNA
tagtgccatttgttcagtgg

SEQ ID NO: 4922 - RNA, 20 nt, synthetic construct
  misc_feature 1..20: note = HBV-targeting guide sequence portion
  source 1..20: mol_type = other RNA
tagtgtctagtttggaagta

SEQ ID NO: 4923 - RNA, 20 nt, synthetic construct
  misc_feature 1..20: note = HBV-targeting guide sequence portion
  source 1..20: mol_type = other RNA
tagttaatcattacttccaa

SEQ ID NO: 4924 - RNA, 20 nt, synthetic construct
  misc_feature 1..20: note = HBV-targeting guide sequence portion
  source 1..20: mol_type = other RNA
tagttccccctagaaaattg

SEQ ID NO: 4925 - RNA, 20 nt, synthetic construct
  misc_feature 1..20: note = HBV-targeting guide sequence portion
  source 1..20: mol_type = other RNA
tagttctccccagcaaagaa

SEQ ID NO: 4926 - RNA, 20 nt, synthetic construct
  misc_feature 1..20: note = HBV-targeting guide sequence portion
  source 1..20: mol_type = other RNA
tagttgtctgaactttaggc

SEQ ID NO: 4927 - RNA, 20 nt, synthetic construct
  misc_feature 1..20: note = HBV-targeting guide sequence portion
  source 1..20: mol_type = other RNA
tagtttggaagtaatgatta

SEQ ID NO: 4928 - RNA, 20 nt, synthetic construct
  misc_feature 1..20: note = HBV-targeting guide sequence portion
  source 1..20: mol_type = other RNA
tataaaacacccgccttcca

SEQ ID NO: 4929 - RNA, 20 nt, synthetic construct
  misc_feature 1..20: note = HBV-targeting guide sequence portion
  source 1..20: mol_type = other RNA
tataaagaatttggagctac

SEQ ID NO: 4930 - RNA, 20 nt, synthetic construct
  misc_feature 1..20: note = HBV-targeting guide sequence portion
  source 1..20: mol_type = other RNA
tataaagggactcaagatgc

SEQ ID NO: 4931 - RNA, 20 nt, synthetic construct
  misc_feature 1..20: note = HBV-targeting guide sequence portion
  source 1..20: mol_type = other RNA
tataactgaaagccaaacag

SEQ ID NO: 4932 - RNA, 20 nt, synthetic construct
  misc_feature 1..20: note = HBV-targeting guide sequence portion
  source 1..20: mol_type = other RNA
tataagagagtgtcaacaca

SEQ ID NO: 4933 - RNA, 20 nt, synthetic construct
  misc_feature 1..20: note = HBV-targeting guide sequence portion
  source 1..20: mol_type = other RNA
tataagctggaggagtgcga

SEQ ID NO: 4934 - RNA, 20 nt, synthetic construct
  misc_feature 1..20: note = HBV-targeting guide sequence portion
  source 1..20: mol_type = other RNA
tatacatcgttcccatggct

SEQ ID NO: 4935 - RNA, 20 nt, synthetic construct
  misc_feature 1..20: note = HBV-targeting guide sequence portion
  source 1..20: mol_type = other RNA
tatacatctacaccaagata

SEQ ID NO: 4936 - RNA, 20 nt, synthetic construct
  misc_feature 1..20: note = HBV-targeting guide sequence portion
  source 1..20: mol_type = other RNA
tataccgctgttaccaattt

SEQ ID NO: 4937 - RNA, 20 nt, synthetic construct
  misc_feature 1..20: note = HBV-targeting guide sequence portion
  source 1..20: mol_type = other RNA
tatagaccaccaaatgcccc

SEQ ID NO: 4938 - RNA, 20 nt, synthetic construct
  misc_feature 1..20: note = HBV-targeting guide sequence portion
  source 1..20: mol_type = other RNA
tatataaaacacccgccttc

SEQ ID NO: 4939 - RNA, 20 nt, synthetic construct
  misc_feature 1..20: note = HBV-targeting guide sequence portion
  source 1..20: mol_type = other RNA
tatataagagagtgtcaaca

SEQ ID NO: 4940 - RNA, 20 nt, synthetic construct
  misc_feature 1..20: note = HBV-targeting guide sequence portion
  source 1..20: mol_type = other RNA
tatatggatgatgtggtatt

SEQ ID NO: 4941 - RNA, 20 nt, synthetic construct
  misc_feature 1..20: note = HBV-targeting guide sequence portion
  source 1..20: mol_type = other RNA
tatatgggtcaatgtccatg

SEQ ID NO: 4942 - RNA, 20 nt, synthetic construct
  misc_feature 1..20: note = HBV-targeting guide sequence portion
  source 1..20: mol_type = other RNA
tatattaggaaaagagggtg

SEQ ID NO: 4943 - RNA, 20 nt, synthetic construct
  misc_feature 1..20: note = HBV-targeting guide sequence portion
  source 1..20: mol_type = other RNA
tatatttgcgggagaggaca

SEQ ID NO: 4944 - RNA, 20 nt, synthetic construct
  misc_feature 1..20: note = HBV-targeting guide sequence portion
  source 1..20: mol_type = other RNA
tatcaaaaaatgtgaacagt

SEQ ID NO: 4945 - RNA, 20 nt, synthetic construct
  misc_feature 1..20: note = HBV-targeting guide sequence portion
  source 1..20: mol_type = other RNA
tatcaacacttccggagact

SEQ ID NO: 4946 - RNA, 20 nt, synthetic construct
  misc_feature 1..20: note = HBV-targeting guide sequence portion
  source 1..20: mol_type = other RNA
tatcaaggtatgtttcccgt

SEQ ID NO: 4947 - RNA, 20 nt, synthetic construct
  misc_feature 1..20: note = HBV-targeting guide sequence portion
  source 1..20: mol_type = other RNA
tatcatcttcctcttcatcc

SEQ ID NO: 4948 - RNA, 20 nt, synthetic construct
  misc_feature 1..20: note = HBV-targeting guide sequence portion
  source 1..20: mol_type = other RNA
tatccaagggcaagtatttg

SEQ ID NO: 4949 - RNA, 20 nt, synthetic construct
  misc_feature 1..20: note = HBV-targeting guide sequence portion
  source 1..20: mol_type = other RNA
tatccagaacatctagttaa

SEQ ID NO: 4950 - RNA, 20 nt, synthetic construct
  misc_feature 1..20: note = HBV-targeting guide sequence portion
  source 1..20: mol_type = other RNA
tatccctcctgttgctgtac

SEQ ID NO: 4951 - RNA, 20 nt, synthetic construct
  misc_feature 1..20: note = HBV-targeting guide sequence portion
  source 1..20: mol_type = other RNA
tatcccttggactcataagg

SEQ ID NO: 4952 - RNA, 20 nt, synthetic construct
  misc_feature 1..20: note = HBV-targeting guide sequence portion
  source 1..20: mol_type = other RNA
tatcctaaattcaccaaata

SEQ ID NO: 4953 - RNA, 20 nt, synthetic construct
  misc_feature 1..20: note = HBV-targeting guide sequence portion
  source 1..20: mol_type = other RNA
tatcctatcaacacttccgg

SEQ ID NO: 4954 - RNA, 20 nt, synthetic construct
  misc_feature 1..20: note = HBV-targeting guide sequence portion
  source 1..20: mol_type = other RNA
tatcctgctttaatgccctt

SEQ ID NO: 4955 - RNA, 20 nt, synthetic construct
  misc_feature 1..20: note = HBV-targeting guide sequence portion
  source 1..20: mol_type = other RNA
tatcgctggatgtgtctgcg

SEQ ID NO: 4956 - RNA, 20 nt, synthetic construct
  misc_feature 1..20: note = HBV-targeting guide sequence portion
  source 1..20: mol_type = other RNA
tatcgggatgccttggagtc

SEQ ID NO: 4957 - RNA, 20 nt, synthetic construct
  misc_feature 1..20: note = HBV-targeting guide sequence portion
  source 1..20: mol_type = other RNA
tatcgtcaatcttctcgagg

SEQ ID NO: 4958 - RNA, 20 nt, synthetic construct
  misc_feature 1..20: note = HBV-targeting guide sequence portion
  source 1..20: mol_type = other RNA
tatctagaagatctcgtacg

SEQ ID NO: 4959 - RNA, 20 nt, synthetic construct
  misc_feature 1..20: note = HBV-targeting guide sequence portion
  source 1..20: mol_type = other RNA
tatctccctgctggtggctc

SEQ ID NO: 4960 - RNA, 20 nt, synthetic construct
  misc_feature 1..20: note = HBV-targeting guide sequence portion
  source 1..20: mol_type = other RNA
tatcttggtgtagatgtata

SEQ ID NO: 4961 - RNA, 20 nt, synthetic construct
  misc_feature 1..20: note = HBV-targeting guide sequence portion
  source 1..20: mol_type = other RNA
tatgaccaagccccaaccag

SEQ ID NO: 4962 - RNA, 20 nt, synthetic construct
  misc_feature 1..20: note = HBV-targeting guide sequence portion
  source 1..20: mol_type = other RNA
tatgagtccaagggatacta

SEQ ID NO: 4963 - RNA, 20 nt, synthetic construct
  misc_feature 1..20: note = HBV-targeting guide sequence portion
  source 1..20: mol_type = other RNA
tatgagtgttgacataactg

SEQ ID NO: 4964 - RNA, 20 nt, synthetic construct
  misc_feature 1..20: note = HBV-targeting guide sequence portion
  source 1..20: mol_type = other RNA
tatgatgtgattttgtggca

SEQ ID NO: 4965 - RNA, 20 nt, synthetic construct
  misc_feature 1..20: note = HBV-targeting guide sequence portion
  source 1..20: mol_type = other RNA
tatgcatgtattcaatctaa

SEQ ID NO: 4966 - RNA, 20 nt, synthetic construct
  misc_feature 1..20: note = HBV-targeting guide sequence portion
  source 1..20: mol_type = other RNA
tatgccctgagcctgagggc

SEQ ID NO: 4967 - RNA, 20 nt, synthetic construct
  misc_feature 1..20: note = HBV-targeting guide sequence portion
  source 1..20: mol_type = other RNA
tatgcctacagcctcctagt

SEQ ID NO: 4968 - RNA, 20 nt, synthetic construct
  misc_feature 1..20: note = HBV-targeting guide sequence portion
  source 1..20: mol_type = other RNA
tatgcctcaaggtcggtcgt

SEQ ID NO: 4969 - RNA, 20 nt, synthetic construct
  misc_feature 1..20: note = HBV-targeting guide sequence portion
  source 1..20: mol_type = other RNA
tatgcctcatcttcttgttg

SEQ ID NO: 4970 - RNA, 20 nt, synthetic construct
  misc_feature 1..20: note = HBV-targeting guide sequence portion
  source 1..20: mol_type = other RNA
tatgcctgctaggttttatc

SEQ ID NO: 4971 - RNA, 20 nt, synthetic construct
  misc_feature 1..20: note = HBV-targeting guide sequence portion
  source 1..20: mol_type = other RNA
tatggaaggcgggtgtttta

SEQ ID NO: 4972 - RNA, 20 nt, synthetic construct
  misc_feature 1..20: note = HBV-targeting guide sequence portion
  source 1..20: mol_type = other RNA
tatggatcggcagaggagcc

SEQ ID NO: 4973 - RNA, 20 nt, synthetic construct
  misc_feature 1..20: note = HBV-targeting guide sequence portion
  source 1..20: mol_type = other RNA
tatggatgatgtggtattgg

SEQ ID NO: 4974 - RNA, 20 nt, synthetic construct
  misc_feature 1..20: note = HBV-targeting guide sequence portion
  source 1..20: mol_type = other RNA
tatgggagtgggcctcagcc

SEQ ID NO: 4975 - RNA, 20 nt, synthetic construct
  misc_feature 1..20: note = HBV-targeting guide sequence portion
  source 1..20: mol_type = other RNA
tatgggcctaaagttcagac

SEQ ID NO: 4976 - RNA, 20 nt, synthetic construct
  misc_feature 1..20: note = HBV-targeting guide sequence portion
  source 1..20: mol_type = other RNA
tatgggtcaatgtccatgcc

SEQ ID NO: 4977 - RNA, 20 nt, synthetic construct
  misc_feature 1..20: note = HBV-targeting guide sequence portion
  source 1..20: mol_type = other RNA
tatggtgacccacagaatga

SEQ ID NO: 4978 - RNA, 20 nt, synthetic construct
  misc_feature 1..20: note = HBV-targeting guide sequence portion
  source 1..20: mol_type = other RNA
tatggtgaggtgaacaatgc

SEQ ID NO: 4979 - RNA, 20 nt, synthetic construct
  misc_feature 1..20: note = HBV-targeting guide sequence portion
  source 1..20: mol_type = other RNA
tatgtaagaccttgggcaag

SEQ ID NO: 4980 - RNA, 20 nt, synthetic construct
  misc_feature 1..20: note = HBV-targeting guide sequence portion
  source 1..20: mol_type = other RNA
tatgtatccctcctgttgct

SEQ ID NO: 4981 - RNA, 20 nt, synthetic construct
  misc_feature 1..20: note = HBV-targeting guide sequence portion
  source 1..20: mol_type = other RNA
tatgtcaacactcatatggg

SEQ ID NO: 4982 - RNA, 20 nt, synthetic construct
  misc_feature 1..20: note = HBV-targeting guide sequence portion
  source 1..20: mol_type = other RNA
tatgtcattgattgttgggg

SEQ ID NO: 4983 - RNA, 20 nt, synthetic construct
  misc_feature 1..20: note = HBV-targeting guide sequence portion
  source 1..20: mol_type = other RNA
tatgtgagaggcagtagtcg

SEQ ID NO: 4984 - RNA, 20 nt, synthetic construct
  misc_feature 1..20: note = HBV-targeting guide sequence portion
  source 1..20: mol_type = other RNA
tatgtgttgacactctctta

SEQ ID NO: 4985 - RNA, 20 nt, synthetic construct
  misc_feature 1..20: note = HBV-targeting guide sequence portion
  source 1..20: mol_type = other RNA
tatgtttcccgtctgtcctc

SEQ ID NO: 4986 - RNA, 20 nt, synthetic construct
  misc_feature 1..20: note = HBV-targeting guide sequence portion
  source 1..20: mol_type = other RNA
tattaaaccttattatccag

SEQ ID NO: 4987 - RNA, 20 nt, synthetic construct
  misc_feature 1..20: note = HBV-targeting guide sequence portion
  source 1..20: mol_type = other RNA
tattaggaaaagagggtgtt

SEQ ID NO: 4988 - RNA, 20 nt, synthetic construct
  misc_feature 1..20: note = HBV-targeting guide sequence portion
  source 1..20: mol_type = other RNA
tattatcaaaaaatgtgaac

SEQ ID NO: 4989 - RNA, 20 nt, synthetic construct
  misc_feature 1..20: note = HBV-targeting guide sequence portion
  source 1..20: mol_type = other RNA
tattatccagaacatctagt

SEQ ID NO: 4990 - RNA, 20 nt, synthetic construct
  misc_feature 1..20: note = HBV-targeting guide sequence portion
  source 1..20: mol_type = other RNA
tattcaatctaagcaggctt

SEQ ID NO: 4991 - RNA, 20 nt, synthetic construct
  misc_feature 1..20: note = HBV-targeting guide sequence portion
  source 1..20: mol_type = other RNA
tattcccatcccatcatcct

SEQ ID NO: 4992 - RNA, 20 nt, synthetic construct
  misc_feature 1..20: note = HBV-targeting guide sequence portion
  source 1..20: mol_type = other RNA
tattctcttaatttcatggg

SEQ ID NO: 4993 - RNA, 20 nt, synthetic construct
  misc_feature 1..20: note = HBV-targeting guide sequence portion
  source 1..20: mol_type = other RNA
tattcttctactgtacctgt

SEQ ID NO: 4994 - RNA, 20 nt, synthetic construct
  misc_feature 1..20: note = HBV-targeting guide sequence portion
  source 1..20: mol_type = other RNA
tattcttgggaacaagagct

SEQ ID NO: 4995 - RNA, 20 nt, synthetic construct
  misc_feature 1..20: note = HBV-targeting guide sequence portion
  source 1..20: mol_type = other RNA
tattgattggaaagtgtgtc

SEQ ID NO: 4996 - RNA, 20 nt, synthetic construct
  misc_feature 1..20: note = HBV-targeting guide sequence portion
  source 1..20: mol_type = other RNA
tattgggggccaagtctgta

SEQ ID NO: 4997 - RNA, 20 nt, synthetic construct
  misc_feature 1..20: note = HBV-targeting guide sequence portion
  source 1..20: mol_type = other RNA
tattgtgaggattcttgtca

SEQ ID NO: 4998 - RNA, 20 nt, synthetic construct
  misc_feature 1..20: note = HBV-targeting guide sequence portion
  source 1..20: mol_type = other RNA
tattgtggtttcacatttct

SEQ ID NO: 4999 - RNA, 20 nt, synthetic construct
  misc_feature 1..20: note = HBV-targeting guide sequence portion
  source 1..20: mol_type = other RNA
tattgtttacacagaaaggc

SEQ ID NO: 5000 - RNA, 20 nt, synthetic construct
  misc_feature 1..20: note = HBV-targeting guide sequence portion
  source 1..20: mol_type = other RNA
tatttacacactctatggaa

SEQ ID NO: 5001 - RNA, 20 nt, synthetic construct
  misc_feature 1..20: note = HBV-targeting guide sequence portion
  source 1..20: mol_type = other RNA
tatttgcgggagaggacaac

SEQ ID NO: 5002 - RNA, 20 nt, synthetic construct
  misc_feature 1..20: note = HBV-targeting guide sequence portion
  source 1..20: mol_type = other RNA
tatttggtgaatttaggata

SEQ ID NO: 5003 - RNA, 20 nt, synthetic construct
  misc_feature 1..20: note = HBV-targeting guide sequence portion
  source 1..20: mol_type = other RNA
tatttggtgtcttttggagt

SEQ ID NO: 5004 - RNA, 20 nt, synthetic construct
  misc_feature 1..20: note = HBV-targeting guide sequence portion
  source 1..20: mol_type = other RNA
tcaaaaaatgtgaacagttt

SEQ ID NO: 5005 - RNA, 20 nt, synthetic construct
  misc_feature 1..20: note = HBV-targeting guide sequence portion
  source 1..20: mol_type = other RNA
tcaaagaatgtttcagaaaa

SEQ ID NO: 5006 - RNA, 20 nt, synthetic construct
  misc_feature 1..20: note = HBV-targeting guide sequence portion
  source 1..20: mol_type = other RNA
tcaaagactgtttgtttaaa

SEQ ID NO: 5007 - RNA, 20 nt, synthetic construct
  misc_feature 1..20: note = HBV-targeting guide sequence portion
  source 1..20: mol_type = other RNA
tcaacaaggaaaaccccgcc

SEQ ID NO: 5008 - RNA, 20 nt, synthetic construct
  misc_feature 1..20: note = HBV-targeting guide sequence portion
  source 1..20: mol_type = other RNA
tcaacacatagcgcctcatt

SEQ ID NO: 5009 - RNA, 20 nt, synthetic construct
  misc_feature 1..20: note = HBV-targeting guide sequence portion
  source 1..20: mol_type = other RNA
tcaacactcatatgggccta

SEQ ID NO: 5010 - RNA, 20 nt, synthetic construct
  misc_feature 1..20: note = HBV-targeting guide sequence portion
  source 1..20: mol_type = other RNA
tcaacacttccggagacttg

SEQ ID NO: 5011 - RNA, 20 nt, synthetic construct
  misc_feature 1..20: note = HBV-targeting guide sequence portion
  source 1..20: mol_type = other RNA
tcaaccaccagcacgggacc

SEQ ID NO: 5012 - RNA, 20 nt, synthetic construct
  misc_feature 1..20: note = HBV-targeting guide sequence portion
  source 1..20: mol_type = other RNA
tcaaccgtcttttctcatta

SEQ ID NO: 5013 - RNA, 20 nt, synthetic construct
  misc_feature 1..20: note = HBV-targeting guide sequence portion
  source 1..20: mol_type = other RNA
tcaacgaattgtgggtcttc

SEQ ID NO: 5014 - RNA, 20 nt, synthetic construct
  misc_feature 1..20: note = HBV-targeting guide sequence portion
  source 1..20: mol_type = other RNA
tcaacgaccgaccttgaggc

SEQ ID NO: 5015 - RNA, 20 nt, synthetic construct
  misc_feature 1..20: note = HBV-targeting guide sequence portion
  source 1..20: mol_type = other RNA
tcaagatgctgtacagactt

SEQ ID NO: 5016 - RNA, 20 nt, synthetic construct
  misc_feature 1..20: note = HBV-targeting guide sequence portion
  source 1..20: mol_type = other RNA
tcaagcatctagggacctag

SEQ ID NO: 5017 - RNA, 20 nt, synthetic construct
  misc_feature 1..20: note = HBV-targeting guide sequence portion
  source 1..20: mol_type = other RNA
tcaagcctccaagctgtgcc

SEQ ID NO: 5018 - RNA, 20 nt, synthetic construct
  misc_feature 1..20: note = HBV-targeting guide sequence portion
  source 1..20: mol_type = other RNA
tcaaggaacctctatgtatc

SEQ ID NO: 5019 - RNA, 20 nt, synthetic construct
  misc_feature 1..20: note = HBV-targeting guide sequence portion
  source 1..20: mol_type = other RNA
tcaaggtatgtttcccgtct

SEQ ID NO: 5020 - RNA, 20 nt, synthetic construct
  misc_feature 1..20: note = HBV-targeting guide sequence portion
  source 1..20: mol_type = other RNA
tcaaggtcggtcgttgacat

SEQ ID NO: 5021 - RNA, 20 nt, synthetic construct
  misc_feature 1..20: note = HBV-targeting guide sequence portion
  source 1..20: mol_type = other RNA
tcaataggcctgttaaccgg

SEQ ID NO: 5022 - RNA, 20 nt, synthetic construct
  misc_feature 1..20: note = HBV-targeting guide sequence portion
  source 1..20: mol_type = other RNA
tcaatcccaacaaggatccc

SEQ ID NO: 5023 - RNA, 20 nt, synthetic construct
  misc_feature 1..20: note = HBV-targeting guide sequence portion
  source 1..20: mol_type = other RNA
tcaatcgccgcgtcgcagaa

SEQ ID NO: 5024 - RNA, 20 nt, synthetic construct
  misc_feature 1..20: note = HBV-targeting guide sequence portion
  source 1..20: mol_type = other RNA
tcaatctaagcaggctttca

SEQ ID NO: 5025 - RNA, 20 nt, synthetic construct
  misc_feature 1..20: note = HBV-targeting guide sequence portion
  source 1..20: mol_type = other RNA
tcaatctcggggatctcaat

SEQ ID NO: 5026 - RNA, 20 nt, synthetic construct
  misc_feature 1..20: note = HBV-targeting guide sequence portion
  source 1..20: mol_type = other RNA
tcaatcttctcgaggattgg

SEQ ID NO: 5027 - RNA, 20 nt, synthetic construct
  misc_feature 1..20: note = HBV-targeting guide sequence portion
  source 1..20: mol_type = other RNA
tcaatgacatagcccatgaa

SEQ ID NO: 5028 - RNA, 20 nt, synthetic construct
  misc_feature 1..20: note = HBV-targeting guide sequence portion
  source 1..20: mol_type = other RNA
tcaatgtccatgccctaaag

SEQ ID NO: 5029 - RNA, 20 nt, synthetic construct
  misc_feature 1..20: note = HBV-targeting guide sequence portion
  source 1..20: mol_type = other RNA
tcaatgttagtatcccttgg

SEQ ID NO: 5030 - RNA, 20 nt, synthetic construct
  misc_feature 1..20: note = HBV-targeting guide sequence portion
  source 1..20: mol_type = other RNA
tcaatttcaaccgtcttttc

SEQ ID NO: 5031 - RNA, 20 nt, synthetic construct
  misc_feature 1..20: note = HBV-targeting guide sequence portion
  source 1..20: mol_type = other RNA
tcaattttctagggggaact

SEQ ID NO: 5032 - RNA, 20 nt, synthetic construct
  misc_feature 1..20: note = HBV-targeting guide sequence portion
  source 1..20: mol_type = other RNA
tcacaataccgcagagtcta

SEQ ID NO: 5033 - RNA, 20 nt, synthetic construct
  misc_feature 1..20: note = HBV-targeting guide sequence portion
  source 1..20: mol_type = other RNA
tcacatatcgtcaatcttct

SEQ ID NO: 5034 - RNA, 20 nt, synthetic construct
  misc_feature 1..20: note = HBV-targeting guide sequence portion
  source 1..20: mol_type = other RNA
tcacatcaggattcctagga

SEQ ID NO: 5035 - RNA, 20 nt, synthetic construct
  misc_feature 1..20: note = HBV-targeting guide sequence portion
  source 1..20: mol_type = other RNA
tcacatcatacacaaaatca

SEQ ID NO: 5036 - RNA, 20 nt, synthetic construct
  misc_feature 1..20: note = HBV-targeting guide sequence portion
  source 1..20: mol_type = other RNA
tcacatttcttgtcttactt

SEQ ID NO: 5037 - RNA, 20 nt, synthetic construct
  misc_feature 1..20: note = HBV-targeting guide sequence portion
  source 1..20: mol_type = other RNA
tcacattttttgataatatc

SEQ ID NO: 5038 - RNA, 20 nt, synthetic construct
  misc_feature 1..20: note = HBV-targeting guide sequence portion
  source 1..20: mol_type = other RNA
tcaccaaatacttgcccttg

SEQ ID NO: 5039 - RNA, 20 nt, synthetic construct
  misc_feature 1..20: note = HBV-targeting guide sequence portion
  source 1..20: mol_type = other RNA
tcaccaacctcctgtcctcc

SEQ ID NO: 5040 - RNA, 20 nt, synthetic construct
  misc_feature 1..20: note = HBV-targeting guide sequence portion
  source 1..20: mol_type = other RNA
tcaccatactgcactcaggc

SEQ ID NO: 5041 - RNA, 20 nt, synthetic construct
  misc_feature 1..20: note = HBV-targeting guide sequence portion
  source 1..20: mol_type = other RNA
tcaccatattcttgggaaca

SEQ ID NO: 5042 - RNA, 20 nt, synthetic construct
  misc_feature 1..20: note = HBV-targeting guide sequence portion
  source 1..20: mol_type = other RNA
tcaccccaccgcacggaggc

SEQ ID NO: 5043 - RNA, 20 nt, synthetic construct
  misc_feature 1..20: note = HBV-targeting guide sequence portion
  source 1..20: mol_type = other RNA
tcacctcaccatactgcact

SEQ ID NO: 5044 - RNA, 20 nt, synthetic construct
  misc_feature 1..20: note = HBV-targeting guide sequence portion
  source 1..20: mol_type = other RNA
tcacctctgcacgtcgcatg

SEQ ID NO: 5045 - RNA, 20 nt, synthetic construct
  misc_feature 1..20: note = HBV-targeting guide sequence portion
  source 1..20: mol_type = other RNA
tcacctctgcctaatcatct

SEQ ID NO: 5046 - RNA, 20 nt, synthetic construct
  misc_feature 1..20: note = HBV-targeting guide sequence portion
  source 1..20: mol_type = other RNA
tcacggtggtctccatgcga

SEQ ID NO: 5047 - RNA, 20 nt, synthetic construct
  misc_feature 1..20: note = HBV-targeting guide sequence portion
  source 1..20: mol_type = other RNA
tcactcaccaacctcctgtc

SEQ ID NO: 5048 - RNA, 20 nt, synthetic construct
  misc_feature 1..20: note = HBV-targeting guide sequence portion
  source 1..20: mol_type = other RNA
tcactctgggatcttgcaga

SEQ ID NO: 5049 - RNA, 20 nt, synthetic construct
  misc_feature 1..20: note = HBV-targeting guide sequence portion
  source 1..20: mol_type = other RNA
tcactttttcgccaacttac

SEQ ID NO: 5050 - RNA, 20 nt, synthetic construct
  misc_feature 1..20: note = HBV-targeting guide sequence portion
  source 1..20: mol_type = other RNA
tcagaaaactcccggttaac

SEQ ID NO: 5051 - RNA, 20 nt, synthetic construct
  misc_feature 1..20: note = HBV-targeting guide sequence portion
  source 1..20: mol_type = other RNA
tcagaaggcaaaaacgagag

SEQ ID NO: 5052 - RNA, 20 nt, synthetic construct
  misc_feature 1..20: note = HBV-targeting guide sequence portion
  source 1..20: mol_type = other RNA
tcagacaactattgtggttt

SEQ ID NO: 5053 - RNA, 20 nt, synthetic construct
  misc_feature 1..20: note = HBV-targeting guide sequence portion
  source 1..20: mol_type = other RNA
tcagagcaaactccaacaat

SEQ ID NO: 5054 - RNA, 20 nt, synthetic construct
  misc_feature 1..20: note = HBV-targeting guide sequence portion
  source 1..20: mol_type = other RNA
tcagaggtggagacagcggg

SEQ ID NO: 5055 - RNA, 20 nt, synthetic construct
  misc_feature 1..20: note = HBV-targeting guide sequence portion
  source 1..20: mol_type = other RNA
tcagcaaacacttggcacag

SEQ ID NO: 5056 - RNA, 20 nt, synthetic construct
  misc_feature 1..20: note = HBV-targeting guide sequence portion
  source 1..20: mol_type = other RNA
tcagcccgtttctcttggct

SEQ ID NO: 5057 - RNA, 20 nt, synthetic construct
  misc_feature 1..20: note = HBV-targeting guide sequence portion
  source 1..20: mol_type = other RNA
tcagcgcagggtccccaatc

SEQ ID NO: 5058 - RNA, 20 nt, synthetic construct
  misc_feature 1..20: note = HBV-targeting guide sequence portion
  source 1..20: mol_type = other RNA
tcagcgcatgcgtggaacct

SEQ ID NO: 5059 - RNA, 20 nt, synthetic construct
  misc_feature 1..20: note = HBV-targeting guide sequence portion
  source 1..20: mol_type = other RNA
tcagcgccgacgggacgtaa

SEQ ID NO: 5060 - RNA, 20 nt, synthetic construct
  misc_feature 1..20: note = HBV-targeting guide sequence portion
  source 1..20: mol_type = other RNA
tcaggaacagtaaaccctgt

SEQ ID NO: 5061 - RNA, 20 nt, synthetic construct
  misc_feature 1..20: note = HBV-targeting guide sequence portion
  source 1..20: mol_type = other RNA
tcaggacggcagcctacccc

SEQ ID NO: 5062 - RNA, 20 nt, synthetic construct
  misc_feature 1..20: note = HBV-targeting guide sequence portion
  source 1..20: mol_type = other RNA
tcaggagactccaaggcatc

SEQ ID NO: 5063 - RNA, 20 nt, synthetic construct
  misc_feature 1..20: note = HBV-targeting guide sequence portion
  source 1..20: mol_type = other RNA
tcaggattcctaggacccct

SEQ ID NO: 5064 - RNA, 20 nt, synthetic construct
  misc_feature 1..20: note = HBV-targeting guide sequence portion
  source 1..20: mol_type = other RNA
tcaggcaagcaattctttgc

SEQ ID NO: 5065 - RNA, 20 nt, synthetic construct
  misc_feature 1..20: note = HBV-targeting guide sequence portion
  source 1..20: mol_type = other RNA
tcaggctcagggcataatgc

SEQ ID NO: 5066 - RNA, 20 nt, synthetic construct
  misc_feature 1..20: note = HBV-targeting guide sequence portion
  source 1..20: mol_type = other RNA
tcagggcataatgcaaacct

SEQ ID NO: 5067 - RNA, 20 nt, synthetic construct
  misc_feature 1..20: note = HBV-targeting guide sequence portion
  source 1..20: mol_type = other RNA
tcaggtattgtttacacaga

SEQ ID NO: 5068 - RNA, 20 nt, synthetic construct
  misc_feature 1..20: note = HBV-targeting guide sequence portion
  source 1..20: mol_type = other RNA
tcagtcccgagaatgtttgc

SEQ ID NO: 5069 - RNA, 20 nt, synthetic construct
  misc_feature 1..20: note = HBV-targeting guide sequence portion
  source 1..20: mol_type = other RNA
tcagtggttcgtagggcttt

SEQ ID NO: 5070 - RNA, 20 nt, synthetic construct
  misc_feature 1..20: note = HBV-targeting guide sequence portion
  source 1..20: mol_type = other RNA
tcagttatatggatgatgtg

SEQ ID NO: 5071 - RNA, 20 nt, synthetic construct
  misc_feature 1..20: note = HBV-targeting guide sequence portion
  source 1..20: mol_type = other RNA
tcagttatgtcaacactcat

SEQ ID NO: 5072 - RNA, 20 nt, synthetic construct
  misc_feature 1..20: note = HBV-targeting guide sequence portion
  source 1..20: mol_type = other RNA
tcagtttactagtgccattt

SEQ ID NO: 5073 - RNA, 20 nt, synthetic construct
  misc_feature 1..20: note = HBV-targeting guide sequence portion
  source 1..20: mol_type = other RNA
tcataaggtgggaaatttta

SEQ ID NO: 5074 - RNA, 20 nt, synthetic construct
  misc_feature 1..20: note = HBV-targeting guide sequence portion
  source 1..20: mol_type = other RNA
tcatacacaaaatcaaagaa

SEQ ID NO: 5075 - RNA, 20 nt, synthetic construct
  misc_feature 1..20: note = HBV-targeting guide sequence portion
  source 1..20: mol_type = other RNA
tcataggccatcagcgcatg

SEQ ID NO: 5076 - RNA, 20 nt, synthetic construct
  misc_feature 1..20: note = HBV-targeting guide sequence portion
  source 1..20: mol_type = other RNA
tcatatgggcctaaagttca

SEQ ID NO: 5077 - RNA, 20 nt, synthetic construct
  misc_feature 1..20: note = HBV-targeting guide sequence portion
  source 1..20: mol_type = other RNA
tcatcaaccaccagcacggg

SEQ ID NO: 5078 - RNA, 20 nt, synthetic construct
  misc_feature 1..20: note = HBV-targeting guide sequence portion
  source 1..20: mol_type = other RNA
tcatccatataactgaaagc

SEQ ID NO: 5079 - RNA, 20 nt, synthetic construct
  misc_feature 1..20: note = HBV-targeting guide sequence portion
  source 1..20: mol_type = other RNA
tcatcctgctgctatgcctc

SEQ ID NO: 5080 - RNA, 20 nt, synthetic construct
  misc_feature 1..20: note = HBV-targeting guide sequence portion
  source 1..20: mol_type = other RNA
tcatcctgggctttcggaaa

SEQ ID NO: 5081 - RNA, 20 nt, synthetic construct
  misc_feature 1..20: note = HBV-targeting guide sequence portion
  source 1..20: mol_type = other RNA
tcatctcttgttcatgtcct

SEQ ID NO: 5082 - RNA, 20 nt, synthetic construct
  misc_feature 1..20: note = HBV-targeting guide sequence portion
  source 1..20: mol_type = other RNA
tcatctgccggaccgtgtgc

SEQ ID NO: 5083 - RNA, 20 nt, synthetic construct
  misc_feature 1..20: note = HBV-targeting guide sequence portion
  source 1..20: mol_type = other RNA
tcatcttcctcttcatcctg

SEQ ID NO: 5084 - RNA, 20 nt, synthetic construct
  misc_feature 1..20: note = HBV-targeting guide sequence portion
  source 1..20: mol_type = other RNA
tcatcttcttgttggttctt

SEQ ID NO: 5085 - RNA, 20 nt, synthetic construct
  misc_feature 1..20: note = HBV-targeting guide sequence portion
  source 1..20: mol_type = other RNA
tcatgggctatgtcattgat

SEQ ID NO: 5086 - RNA, 20 nt, synthetic construct
  misc_feature 1..20: note = HBV-targeting guide sequence portion
  source 1..20: mol_type = other RNA
tcatgtcctactgttcaagc

SEQ ID NO: 5087 - RNA, 20 nt, synthetic construct
  misc_feature 1..20: note = HBV-targeting guide sequence portion
  source 1..20: mol_type = other RNA
tcattaactgtaagcgggcc

SEQ ID NO: 5088 - RNA, 20 nt, synthetic construct
  misc_feature 1..20: note = HBV-targeting guide sequence portion
  source 1..20: mol_type = other RNA
tcattaatctaatctcctcc

SEQ ID NO: 5089 - RNA, 20 nt, synthetic construct
  misc_feature 1..20: note = HBV-targeting guide sequence portion
  source 1..20: mol_type = other RNA
tcattacttccaaactagac

SEQ ID NO: 5090 - RNA, 20 nt, synthetic construct
  misc_feature 1..20: note = HBV-targeting guide sequence portion
  source 1..20: mol_type = other RNA
tcattagttctccccagcaa

SEQ ID NO: 5091 - RNA, 20 nt, synthetic construct
  misc_feature 1..20: note = HBV-targeting guide sequence portion
  source 1..20: mol_type = other RNA
tcattctgtgggtcaccata

SEQ ID NO: 5092 - RNA, 20 nt, synthetic construct
  misc_feature 1..20: note = HBV-targeting guide sequence portion
  source 1..20: mol_type = other RNA
tcattgattgttggggatca

SEQ ID NO: 5093 - RNA, 20 nt, synthetic construct
  misc_feature 1..20: note = HBV-targeting guide sequence portion
  source 1..20: mol_type = other RNA
tcattgccacaaaatcacat

SEQ ID NO: 5094 - RNA, 20 nt, synthetic construct
  misc_feature 1..20: note = HBV-targeting guide sequence portion
  source 1..20: mol_type = other RNA
tcattggaaaacaccctctt

SEQ ID NO: 5095 - RNA, 20 nt, synthetic construct
  misc_feature 1..20: note = HBV-targeting guide sequence portion
  source 1..20: mol_type = other RNA
tccaaaagacaccaaatact

SEQ ID NO: 5096 - RNA, 20 nt, synthetic construct
  misc_feature 1..20: note = HBV-targeting guide sequence portion
  source 1..20: mol_type = other RNA
tccaaaagtaagacaagaaa

SEQ ID NO: 5097 - RNA, 20 nt, synthetic construct
  misc_feature 1..20: note = HBV-targeting guide sequence portion
  source 1..20: mol_type = other RNA
tccaaactagacactattta

SEQ ID NO: 5098 - RNA, 20 nt, synthetic construct
  misc_feature 1..20: note = HBV-targeting guide sequence portion
  source 1..20: mol_type = other RNA
tccaaattctttatatgggt

SEQ ID NO: 5099 - RNA, 20 nt, synthetic construct
  misc_feature 1..20: note = HBV-targeting guide sequence portion
  source 1..20: mol_type = other RNA
tccaacaatccagattggga

SEQ ID NO: 5100 - RNA, 20 nt, synthetic construct
  misc_feature 1..20: note = HBV-targeting guide sequence portion
  source 1..20: mol_type = other RNA
tccaactggtggtcgggaaa

SEQ ID NO: 5101 - RNA, 20 nt, synthetic construct
  misc_feature 1..20: note = HBV-targeting guide sequence portion
  source 1..20: mol_type = other RNA
tccaacttgtcctggttatc

SEQ ID NO: 5102 - RNA, 20 nt, synthetic construct
  misc_feature 1..20: note = HBV-targeting guide sequence portion
  source 1..20: mol_type = other RNA
tccaagagtcctcttatgta

SEQ ID NO: 5103 - RNA, 20 nt, synthetic construct
  misc_feature 1..20: note = HBV-targeting guide sequence portion
  source 1..20: mol_type = other RNA
tccaagctgtgccttgggtg

SEQ ID NO: 5104 - RNA, 20 nt, synthetic construct
  misc_feature 1..20: note = HBV-targeting guide sequence portion
  source 1..20: mol_type = other RNA
tccaaggcatcccgatacag

SEQ ID NO: 5105 - RNA, 20 nt, synthetic construct
  misc_feature 1..20: note = HBV-targeting guide sequence portion
  source 1..20: mol_type = other RNA
tccaagggatactaacattg

SEQ ID NO: 5106 - RNA, 20 nt, synthetic construct
  misc_feature 1..20: note = HBV-targeting guide sequence portion
  source 1..20: mol_type = other RNA
tccaagggcaagtatttggt

SEQ ID NO: 5107 - RNA, 20 nt, synthetic construct
  misc_feature 1..20: note = HBV-targeting guide sequence portion
  source 1..20: mol_type = other RNA
tccaatcaataggcctgtta

SEQ ID NO: 5108 - RNA, 20 nt, synthetic construct
  misc_feature 1..20: note = HBV-targeting guide sequence portion
  source 1..20: mol_type = other RNA
tccaatcactcaccaacctc

SEQ ID NO: 5109 - RNA, 20 nt, synthetic construct
  misc_feature 1..20: note = HBV-targeting guide sequence portion
  source 1..20: mol_type = other RNA
tccaatgagggttaaagaca

SEQ ID NO: 5110 - RNA, 20 nt, synthetic construct
  misc_feature 1..20: note = HBV-targeting guide sequence portion
  source 1..20: mol_type = other RNA
tccacaaccttccaccaaac

SEQ ID NO: 5111 - RNA, 20 nt, synthetic construct
  misc_feature 1..20: note = HBV-targeting guide sequence portion
  source 1..20: mol_type = other RNA
tccacactccaaaagacacc

SEQ ID NO: 5112 - RNA, 20 nt, synthetic construct
  misc_feature 1..20: note = HBV-targeting guide sequence portion
  source 1..20: mol_type = other RNA
tccacagtagctccaaattc

SEQ ID NO: 5113 - RNA, 20 nt, synthetic construct
  misc_feature 1..20: note = HBV-targeting guide sequence portion
  source 1..20: mol_type = other RNA
tccaccaaactctgcaagat

SEQ ID NO: 5114 - RNA, 20 nt, synthetic construct
  misc_feature 1..20: note = HBV-targeting guide sequence portion
  source 1..20: mol_type = other RNA
tccaccacgagtctagactc

SEQ ID NO: 5115 - RNA, 20 nt, synthetic construct
  misc_feature 1..20: note = HBV-targeting guide sequence portion
  source 1..20: mol_type = other RNA
tccaccagcaatcctctggg

SEQ ID NO: 5116 - RNA, 20 nt, synthetic construct
  misc_feature 1..20: note = HBV-targeting guide sequence portion
  source 1..20: mol_type = other RNA
tccaccccaaaaggcctccg

SEQ ID NO: 5117 - RNA, 20 nt, synthetic construct
  misc_feature 1..20: note = HBV-targeting guide sequence portion
  source 1..20: mol_type = other RNA
tccacctctgagaaacactc

SEQ ID NO: 5118 - RNA, 20 nt, synthetic construct
  misc_feature 1..20: note = HBV-targeting guide sequence portion
  source 1..20: mol_type = other RNA
tccacgcatgcgctgatggc

SEQ ID NO: 5119 - RNA, 20 nt, synthetic construct
  misc_feature 1..20: note = HBV-targeting guide sequence portion
  source 1..20: mol_type = other RNA
tccagaacatctagttaatc

SEQ ID NO: 5120 - RNA, 20 nt, synthetic construct
  misc_feature 1..20: note = HBV-targeting guide sequence portion
  source 1..20: mol_type = other RNA
tccagaagaaccaacaagaa

SEQ ID NO: 5121 - RNA, 20 nt, synthetic construct
  misc_feature 1..20: note = HBV-targeting guide sequence portion
  source 1..20: mol_type = other RNA
tccagaccggctgcgagcaa

SEQ ID NO: 5122 - RNA, 20 nt, synthetic construct
  misc_feature 1..20: note = HBV-targeting guide sequence portion
  source 1..20: mol_type = other RNA
tccagattgggacttcaatc

SEQ ID NO: 5123 - RNA, 20 nt, synthetic construct
  misc_feature 1..20: note = HBV-targeting guide sequence portion
  source 1..20: mol_type = other RNA
tccagcgataaccaggacaa

SEQ ID NO: 5124 - RNA, 20 nt, synthetic construct
  misc_feature 1..20: note = HBV-targeting guide sequence portion
  source 1..20: mol_type = other RNA
tccagctcctaccttgttgg

SEQ ID NO: 5125 - RNA, 20 nt, synthetic construct
  misc_feature 1..20: note = HBV-targeting guide sequence portion
  source 1..20: mol_type = other RNA
tccagcttatagaccaccaa

SEQ ID NO: 5126 - RNA, 20 nt, synthetic construct
  misc_feature 1..20: note = HBV-targeting guide sequence portion
  source 1..20: mol_type = other RNA
tccaggatcatcaaccacca

SEQ ID NO: 5127 - RNA, 20 nt, synthetic construct
  misc_feature 1..20: note = HBV-targeting guide sequence portion
  source 1..20: mol_type = other RNA
tccagttcaggaacagtaaa

SEQ ID NO: 5128 - RNA, 20 nt, synthetic construct
  misc_feature 1..20: note = HBV-targeting guide sequence portion
  source 1..20: mol_type = other RNA
tccagttggcagcacagcct

SEQ ID NO: 5129 - RNA, 20 nt, synthetic construct
  misc_feature 1..20: note = HBV-targeting guide sequence portion
  source 1..20: mol_type = other RNA
tccatactgcggaactccta

SEQ ID NO: 5130 - RNA, 20 nt, synthetic construct
  misc_feature 1..20: note = HBV-targeting guide sequence portion
  source 1..20: mol_type = other RNA
tccatagagtgtgtaaatag

SEQ ID NO: 5131 - RNA, 20 nt, synthetic construct
  misc_feature 1..20: note = HBV-targeting guide sequence portion
  source 1..20: mol_type = other RNA
tccatataactgaaagccaa

SEQ ID NO: 5132 - RNA, 20 nt, synthetic construct
  misc_feature 1..20: note = HBV-targeting guide sequence portion
  source 1..20: mol_type = other RNA
tccatccgaaggttttgtac

SEQ ID NO: 5133 - RNA, 20 nt, synthetic construct
  misc_feature 1..20: note = HBV-targeting guide sequence portion
  source 1..20: mol_type = other RNA
tccatgccctaaagccaccc

SEQ ID NO: 5134 - RNA, 20 nt, synthetic construct
  misc_feature 1..20: note = HBV-targeting guide sequence portion
  source 1..20: mol_type = other RNA
tccatgcgacgtgcagaggt

SEQ ID NO: 5135 - RNA, 20 nt, synthetic construct
  misc_feature 1..20: note = HBV-targeting guide sequence portion
  source 1..20: mol_type = other RNA
tccatgttcagcgcagggtc

SEQ ID NO: 5136 - RNA, 20 nt, synthetic construct
  misc_feature 1..20: note = HBV-targeting guide sequence portion
  source 1..20: mol_type = other RNA
tcccaacaaggatccctggc

SEQ ID NO: 5137 - RNA, 20 nt, synthetic construct
  misc_feature 1..20: note = HBV-targeting guide sequence portion
  source 1..20: mol_type = other RNA
tcccaagaatatggtgaccc

SEQ ID NO: 5138 - RNA, 20 nt, synthetic construct
  misc_feature 1..20: note = HBV-targeting guide sequence portion
  source 1..20: mol_type = other RNA
tcccaatctggattgttgga

SEQ ID NO: 5139 - RNA, 20 nt, synthetic construct
  misc_feature 1..20: note = HBV-targeting guide sequence portion
  source 1..20: mol_type = other RNA
tcccaccttatgagtccaag

SEQ ID NO: 5140 - RNA, 20 nt, synthetic construct
  misc_feature 1..20: note = HBV-targeting guide sequence portion
  source 1..20: mol_type = other RNA
tcccagaggattgctggtgg

SEQ ID NO: 5141 - RNA, 20 nt, synthetic construct
  misc_feature 1..20: note = HBV-targeting guide sequence portion
  source 1..20: mol_type = other RNA
tcccagagtgagaggcctgt

SEQ ID NO: 5142 - RNA, 20 nt, synthetic construct
  misc_feature 1..20: note = HBV-targeting guide sequence portion
  source 1..20: mol_type = other RNA
tcccagtctttaaacaaaca

SEQ ID NO: 5143 - RNA, 20 nt, synthetic construct
  misc_feature 1..20: note = HBV-targeting guide sequence portion
  source 1..20: mol_type = other RNA
tcccataggaattttccgaa

SEQ ID NO: 5144 - RNA, 20 nt, synthetic construct
  misc_feature 1..20: note = HBV-targeting guide sequence portion
  source 1..20: mol_type = other RNA
tcccatcatcctgggctttc

SEQ ID NO: 5145 - RNA, 20 nt, synthetic construct
  misc_feature 1..20: note = HBV-targeting guide sequence portion
  source 1..20: mol_type = other RNA
tcccatcccatcatcctggg

SEQ ID NO: 5146 - RNA, 20 nt, synthetic construct
  misc_feature 1..20: note = HBV-targeting guide sequence portion
  source 1..20: mol_type = other RNA
tcccatggctgctaggctgt

SEQ ID NO: 5147 - RNA, 20 nt, synthetic construct
  misc_feature 1..20: note = HBV-targeting guide sequence portion
  source 1..20: mol_type = other RNA
tccccaacaatcaatgacat

SEQ ID NO: 5148 - RNA, 20 nt, synthetic construct
  misc_feature 1..20: note = HBV-targeting guide sequence portion
  source 1..20: mol_type = other RNA
tccccaacctccaatcactc

SEQ ID NO: 5149 - RNA, 20 nt, synthetic construct
  misc_feature 1..20: note = HBV-targeting guide sequence portion
  source 1..20: mol_type = other RNA
tccccaatcctcgagaagat

SEQ ID NO: 5150 - RNA, 20 nt, synthetic construct
  misc_feature 1..20: note = HBV-targeting guide sequence portion
  source 1..20: mol_type = other RNA
tccccagcaaagaattgctt

SEQ ID NO: 5151 - RNA, 20 nt, synthetic construct
  misc_feature 1..20: note = HBV-targeting guide sequence portion
  source 1..20: mol_type = other RNA
tcccccaactcctcccagtc

SEQ ID NO: 5152 - RNA, 20 nt, synthetic construct
  misc_feature 1..20: note = HBV-targeting guide sequence portion
  source 1..20: mol_type = other RNA
tcccccactgtttggctttc

SEQ ID NO: 5153 - RNA, 20 nt, synthetic construct
  misc_feature 1..20: note = HBV-targeting guide sequence portion
  source 1..20: mol_type = other RNA
tccccctagaaaattgagag

SEQ ID NO: 5154 - RNA, 20 nt, synthetic construct
  misc_feature 1..20: note = HBV-targeting guide sequence portion
  source 1..20: mol_type = other RNA
tccccgagattgagatcttc

SEQ ID NO: 5155 - RNA, 20 nt, synthetic construct
  misc_feature 1..20: note = HBV-targeting guide sequence portion
  source 1..20: mol_type = other RNA
tccccgtctgtgccttctca

SEQ ID NO: 5156 - RNA, 20 nt, synthetic construct
  misc_feature 1..20: note = HBV-targeting guide sequence portion
  source 1..20: mol_type = other RNA
tcccctagaagaagaactcc

SEQ ID NO: 5157 - RNA, 20 nt, synthetic construct
  misc_feature 1..20: note = HBV-targeting guide sequence portion
  source 1..20: mol_type = other RNA
tcccgaccaccagttggacc

SEQ ID NO: 5158 - RNA, 20 nt, synthetic construct
  misc_feature 1..20: note = HBV-targeting guide sequence portion
  source 1..20: mol_type = other RNA
tcccgagaatgtttgctcca

SEQ ID NO: 5159 - RNA, 20 nt, synthetic construct
  misc_feature 1..20: note = HBV-targeting guide sequence portion
  source 1..20: mol_type = other RNA
tcccgatacagagctgcggc

SEQ ID NO: 5160 - RNA, 20 nt, synthetic construct
  misc_feature 1..20: note = HBV-targeting guide sequence portion
  source 1..20: mol_type = other RNA
tcccgcaaatatacatcgtt

SEQ ID NO: 5161 - RNA, 20 nt, synthetic construct
  misc_feature 1..20: note = HBV-targeting guide sequence portion
  source 1..20: mol_type = other RNA
tcccgcgcaggatccagttg

SEQ ID NO: 5162 - RNA, 20 nt, synthetic construct
  misc_feature 1..20: note = HBV-targeting guide sequence portion
  source 1..20: mol_type = other RNA
tcccgcggacgacccatctc

SEQ ID NO: 5163 - RNA, 20 nt, synthetic construct
  misc_feature 1..20: note = HBV-targeting guide sequence portion
  source 1..20: mol_type = other RNA
tcccggttaacaggcctatt

SEQ ID NO: 5164 - RNA, 20 nt, synthetic construct
  misc_feature 1..20: note = HBV-targeting guide sequence portion
  source 1..20: mol_type = other RNA
tcccgtcggcgctgaatccc

SEQ ID NO: 5165 - RNA, 20 nt, synthetic construct
  misc_feature 1..20: note = HBV-targeting guide sequence portion
  source 1..20: mol_type = other RNA
tcccgtctgtcctctaattc

SEQ ID NO: 5166 - RNA, 20 nt, synthetic construct
  misc_feature 1..20: note = HBV-targeting guide sequence portion
  source 1..20: mol_type = other RNA
tcccgtgctggtggttgatg

SEQ ID NO: 5167 - RNA, 20 nt, synthetic construct
  misc_feature 1..20: note = HBV-targeting guide sequence portion
  source 1..20: mol_type = other RNA
tccctagatgcttgatcttc

SEQ ID NO: 5168 - RNA, 20 nt, synthetic construct
  misc_feature 1..20: note = HBV-targeting guide sequence portion
  source 1..20: mol_type = other RNA
tccctcctgttgctgtacaa

SEQ ID NO: 5169 - RNA, 20 nt, synthetic construct
  misc_feature 1..20: note = HBV-targeting guide sequence portion
  source 1..20: mol_type = other RNA
tccctcgcctcgcagacgaa

SEQ ID NO: 5170 - RNA, 20 nt, synthetic construct
  misc_feature 1..20: note = HBV-targeting guide sequence portion
  source 1..20: mol_type = other RNA
tccctgctggtggctccagt

SEQ ID NO: 5171 - RNA, 20 nt, synthetic construct
  misc_feature 1..20: note = HBV-targeting guide sequence portion
  source 1..20: mol_type = other RNA
tccctggccagacgccaaca

SEQ ID NO: 5172 - RNA, 20 nt, synthetic construct
  misc_feature 1..20: note = HBV-targeting guide sequence portion
  source 1..20: mol_type = other RNA
tcccttggactcataaggtg

SEQ ID NO: 5173 - RNA, 20 nt, synthetic construct
  misc_feature 1..20: note = HBV-targeting guide sequence portion
  source 1..20: mol_type = other RNA
tccctttataccgctgttac

SEQ ID NO: 5174 - RNA, 20 nt, synthetic construct
  misc_feature 1..20: note = HBV-targeting guide sequence portion
  source 1..20: mol_type = other RNA
tccgaaagcccaggatgatg

SEQ ID NO: 5175 - RNA, 20 nt, synthetic construct
  misc_feature 1..20: note = HBV-targeting guide sequence portion
  source 1..20: mol_type = other RNA
tccgaaggttttgtacagca

SEQ ID NO: 5176 - RNA, 20 nt, synthetic construct
  misc_feature 1..20: note = HBV-targeting guide sequence portion
  source 1..20: mol_type = other RNA
tccgaccgaccacggggcgc

SEQ ID NO: 5177 - RNA, 20 nt, synthetic construct
  misc_feature 1..20: note = HBV-targeting guide sequence portion
  source 1..20: mol_type = other RNA
tccgactactgcctctcaca

SEQ ID NO: 5178 - RNA, 20 nt, synthetic construct
  misc_feature 1..20: note = HBV-targeting guide sequence portion
  source 1..20: mol_type = other RNA
tccgcagtatggatcggcag

SEQ ID NO: 5179 - RNA, 20 nt, synthetic construct
  misc_feature 1..20: note = HBV-targeting guide sequence portion
  source 1..20: mol_type = other RNA
tccgcctcctgcctctacca

SEQ ID NO: 5180 - RNA, 20 nt, synthetic construct
  misc_feature 1..20: note = HBV-targeting guide sequence portion
  source 1..20: mol_type = other RNA
tccgcgggattcagcgccga

SEQ ID NO: 5181 - RNA, 20 nt, synthetic construct
  misc_feature 1..20: note = HBV-targeting guide sequence portion
  source 1..20: mol_type = other RNA
tccgcgtaaagagaggtgcg

SEQ ID NO: 5182 - RNA, 20 nt, synthetic construct
  misc_feature 1..20: note = HBV-targeting guide sequence portion
  source 1..20: mol_type = other RNA
tccggaagtgttgataggat

SEQ ID NO: 5183 - RNA, 20 nt, synthetic construct
  misc_feature 1..20: note = HBV-targeting guide sequence portion
  source 1..20: mol_type = other RNA
tccggagacttgtgttgtta

SEQ ID NO: 5184 - RNA, 20 nt, synthetic construct
  misc_feature 1..20: note = HBV-targeting guide sequence portion
  source 1..20: mol_type = other RNA
tccggcagatgagaaggcac

SEQ ID NO: 5185 - RNA, 20 nt, synthetic construct
  misc_feature 1..20: note = HBV-targeting guide sequence portion
  source 1..20: mol_type = other RNA
tccggctcctctgccgatcc

SEQ ID NO: 5186 - RNA, 20 nt, synthetic construct
  misc_feature 1..20: note = HBV-targeting guide sequence portion
  source 1..20: mol_type = other RNA
tccgtacgagatcttctaga

SEQ ID NO: 5187 - RNA, 20 nt, synthetic construct
  misc_feature 1..20: note = HBV-targeting guide sequence portion
  source 1..20: mol_type = other RNA
tccgtgcggtggggtgaacc

SEQ ID NO: 5188 - RNA, 20 nt, synthetic construct
  misc_feature 1..20: note = HBV-targeting guide sequence portion
  source 1..20: mol_type = other RNA
tcctaaattcaccaaatact

SEQ ID NO: 5189 - RNA, 20 nt, synthetic construct
  misc_feature 1..20: note = HBV-targeting guide sequence portion
  source 1..20: mol_type = other RNA
tcctaatatacatctacacc

SEQ ID NO: 5190 - RNA, 20 nt, synthetic construct
  misc_feature 1..20: note = HBV-targeting guide sequence portion
  source 1..20: mol_type = other RNA
tcctaccttgttggcgtctg

SEQ ID NO: 5191 - RNA, 20 nt, synthetic construct
  misc_feature 1..20: note = HBV-targeting guide sequence portion
  source 1..20: mol_type = other RNA
tcctactgttcaagcctcca

SEQ ID NO: 5192 - RNA, 20 nt, synthetic construct
  misc_feature 1..20: note = HBV-targeting guide sequence portion
  source 1..20: mol_type = other RNA
tcctagagtatttggtgtct

SEQ ID NO: 5193 - RNA, 20 nt, synthetic construct
  misc_feature 1..20: note = HBV-targeting guide sequence portion
  source 1..20: mol_type = other RNA
tcctagccgcttgttttgct

SEQ ID NO: 5194 - RNA, 20 nt, synthetic construct
  misc_feature 1..20: note = HBV-targeting guide sequence portion
  source 1..20: mol_type = other RNA
tcctaggaatcctgatgtga

SEQ ID NO: 5195 - RNA, 20 nt, synthetic construct
  misc_feature 1..20: note = HBV-targeting guide sequence portion
  source 1..20: mol_type = other RNA
tcctaggacccctgctcgtg

SEQ ID NO: 5196 - RNA, 20 nt, synthetic construct
  misc_feature 1..20: note = HBV-targeting guide sequence portion
  source 1..20: mol_type = other RNA
tcctagtacaaagatcatta

SEQ ID NO: 5197 - RNA, 20 nt, synthetic construct
  misc_feature 1..20: note = HBV-targeting guide sequence portion
  source 1..20: mol_type = other RNA
tcctatcaacacttccggag

SEQ ID NO: 5198 - RNA, 20 nt, synthetic construct
  misc_feature 1..20: note = HBV-targeting guide sequence portion
  source 1..20: mol_type = other RNA
tcctatgggagtgggcctca

SEQ ID NO: 5199 - RNA, 20 nt, synthetic construct
  misc_feature 1..20: note = HBV-targeting guide sequence portion
  source 1..20: mol_type = other RNA
tcctcacaataccgcagagt

SEQ ID NO: 5200 - RNA, 20 nt, synthetic construct
  misc_feature 1..20: note = HBV-targeting guide sequence portion
  source 1..20: mol_type = other RNA
tcctccaacttgtcctggtt

SEQ ID NO: 5201 - RNA, 20 nt, synthetic construct
  misc_feature 1..20: note = HBV-targeting guide sequence portion
  source 1..20: mol_type = other RNA
tcctccagcttatagaccac

SEQ ID NO: 5202 - RNA, 20 nt, synthetic construct
  misc_feature 1..20: note = HBV-targeting guide sequence portion
  source 1..20: mol_type = other RNA
tcctcccagtctttaaacaa

SEQ ID NO: 5203 - RNA, 20 nt, synthetic construct
  misc_feature 1..20: note = HBV-targeting guide sequence portion
  source 1..20: mol_type = other RNA
tcctcccccaactcctccca

SEQ ID NO: 5204 - RNA, 20 nt, synthetic construct
  misc_feature 1..20: note = HBV-targeting guide sequence portion
  source 1..20: mol_type = other RNA
tcctcgagaagattgacgat

SEQ ID NO: 5205 - RNA, 20 nt, synthetic construct
  misc_feature 1..20: note = HBV-targeting guide sequence portion
  source 1..20: mol_type = other RNA
tcctctaattccaggatcat

SEQ ID NO: 5206 - RNA, 20 nt, synthetic construct
  misc_feature 1..20: note = HBV-targeting guide sequence portion
  source 1..20: mol_type = other RNA
tcctctcccgcaaatataca

SEQ ID NO: 5207 - RNA, 20 nt, synthetic construct
  misc_feature 1..20: note = HBV-targeting guide sequence portion
  source 1..20: mol_type = other RNA
tcctctgccgatccatactg

SEQ ID NO: 5208 - RNA, 20 nt, synthetic construct
  misc_feature 1..20: note = HBV-targeting guide sequence portion
  source 1..20: mol_type = other RNA
tcctctgggattctttcccg

SEQ ID NO: 5209 - RNA, 20 nt, synthetic construct
  misc_feature 1..20: note = HBV-targeting guide sequence portion
  source 1..20: mol_type = other RNA
tcctcttatgtaagaccttg

SEQ ID NO: 5210 - RNA, 20 nt, synthetic construct
  misc_feature 1..20: note = HBV-targeting guide sequence portion
  source 1..20: mol_type = other RNA
tcctcttcatcctgctgcta

SEQ ID NO: 5211 - RNA, 20 nt, synthetic construct
  misc_feature 1..20: note = HBV-targeting guide sequence portion
  source 1..20: mol_type = other RNA
tcctcttctctgcctgccgt

SEQ ID NO: 5212 - RNA, 20 nt, synthetic construct
  misc_feature 1..20: note = HBV-targeting guide sequence portion
  source 1..20: mol_type = other RNA
tcctgaactggagccaccag

SEQ ID NO: 5213 - RNA, 20 nt, synthetic construct
  misc_feature 1..20: note = HBV-targeting guide sequence portion
  source 1..20: mol_type = other RNA
tcctgactggcgattggtag

SEQ ID NO: 5214 - RNA, 20 nt, synthetic construct
  misc_feature 1..20: note = HBV-targeting guide sequence portion
  source 1..20: mol_type = other RNA
tcctgagcattgttcacctc

SEQ ID NO: 5215 - RNA, 20 nt, synthetic construct
  misc_feature 1..20: note = HBV-targeting guide sequence portion
  source 1..20: mol_type = other RNA
tcctgatgtgatgttctcca

SEQ ID NO: 5216 - RNA, 20 nt, synthetic construct
  misc_feature 1..20: note = HBV-targeting guide sequence portion
  source 1..20: mol_type = other RNA
tcctgcctctaccaatcgcc

SEQ ID NO: 5217 - RNA, 20 nt, synthetic construct
  misc_feature 1..20: note = HBV-targeting guide sequence portion
  source 1..20: mol_type = other RNA
tcctgcgcgggacgtccttt

SEQ ID NO: 5218 - RNA, 20 nt, synthetic construct
  misc_feature 1..20: note = HBV-targeting guide sequence portion
  source 1..20: mol_type = other RNA
tcctgctcaaggaacctcta

SEQ ID NO: 5219 - RNA, 20 nt, synthetic construct
  misc_feature 1..20: note = HBV-targeting guide sequence portion
  source 1..20: mol_type = other RNA
tcctgctgctatgcctcatc

SEQ ID NO: 5220 - RNA, 20 nt, synthetic construct
  misc_feature 1..20: note = HBV-targeting guide sequence portion
  source 1..20: mol_type = other RNA
tcctgctttaatgcccttgt

SEQ ID NO: 5221 - RNA, 20 nt, synthetic construct
  misc_feature 1..20: note = HBV-targeting guide sequence portion
  source 1..20: mol_type = other RNA
tcctggaattagaggacaga

SEQ ID NO: 5222 - RNA, 20 nt, synthetic construct
  misc_feature 1..20: note = HBV-targeting guide sequence portion
  source 1..20: mol_type = other RNA
tcctgggctttcggaaaatt

SEQ ID NO: 5223 - RNA, 20 nt, synthetic construct
  misc_feature 1..20: note = HBV-targeting guide sequence portion
  source 1..20: mol_type = other RNA
tcctggttatcgctggatgt

SEQ ID NO: 5224 - RNA, 20 nt, synthetic construct
  misc_feature 1..20: note = HBV-targeting guide sequence portion
  source 1..20: mol_type = other RNA
tcctgtcctccaacttgtcc

SEQ ID NO: 5225 - RNA, 20 nt, synthetic construct
  misc_feature 1..20: note = HBV-targeting guide sequence portion
  source 1..20: mol_type = other RNA
tcctgttgctgtacaaaacc

SEQ ID NO: 5226 - RNA, 20 nt, synthetic construct
  misc_feature 1..20: note = HBV-targeting guide sequence portion
  source 1..20: mol_type = other RNA
tccttccgtacgagatcttc

SEQ ID NO: 5227 - RNA, 20 nt, synthetic construct
  misc_feature 1..20: note = HBV-targeting guide sequence portion
  source 1..20: mol_type = other RNA
tccttgagcaggagtcgtgc

SEQ ID NO: 5228 - RNA, 20 nt, synthetic construct
  misc_feature 1..20: note = HBV-targeting guide sequence portion
  source 1..20: mol_type = other RNA
tccttgttgacaagaatcct

SEQ ID NO: 5229 - RNA, 20 nt, synthetic construct
  misc_feature 1..20: note = HBV-targeting guide sequence portion
  source 1..20: mol_type = other RNA
tccttgttgggattgaagtc

SEQ ID NO: 5230 - RNA, 20 nt, synthetic construct
  misc_feature 1..20: note = HBV-targeting guide sequence portion
  source 1..20: mol_type = other RNA
tcctttgtttacgtcccgtc

SEQ ID NO: 5231 - RNA, 20 nt, synthetic construct
  misc_feature 1..20: note = HBV-targeting guide sequence portion
  source 1..20: mol_type = other RNA
tcgagaagattgacgatatg

SEQ ID NO: 5232 - RNA, 20 nt, synthetic construct
  misc_feature 1..20: note = HBV-targeting guide sequence portion
  source 1..20: mol_type = other RNA
tcgagatgggtcgtccgcgg

SEQ ID NO: 5233 - RNA, 20 nt, synthetic construct
  misc_feature 1..20: note = HBV-targeting guide sequence portion
  source 1..20: mol_type = other RNA
tcgaggattggggaccctgc

SEQ ID NO: 5234 - RNA, 20 nt, synthetic construct
  misc_feature 1..20: note = HBV-targeting guide sequence portion
  source 1..20: mol_type = other RNA
tcgaggccgcttggggccct

SEQ ID NO: 5235 - RNA, 20 nt, synthetic construct
  misc_feature 1..20: note = HBV-targeting guide sequence portion
  source 1..20: mol_type = other RNA
tcgcactcctccagcttata

SEQ ID NO: 5236 - RNA, 20 nt, synthetic construct
  misc_feature 1..20: note = HBV-targeting guide sequence portion
  source 1..20: mol_type = other RNA
tcgcagaagatctcaatctc

SEQ ID NO: 5237 - RNA, 20 nt, synthetic construct
  misc_feature 1..20: note = HBV-targeting guide sequence portion
  source 1..20: mol_type = other RNA
tcgcagacgaagatctcaat

SEQ ID NO: 5238 - RNA, 20 nt, synthetic construct
  misc_feature 1..20: note = HBV-targeting guide sequence portion
  source 1..20: mol_type = other RNA
tcgcagccggtctggagcaa

SEQ ID NO: 5239 - RNA, 20 nt, synthetic construct
  misc_feature 1..20: note = HBV-targeting guide sequence portion
  source 1..20: mol_type = other RNA
tcgcagtccccaacctccaa

SEQ ID NO: 5240 - RNA, 20 nt, synthetic construct
  misc_feature 1..20: note = HBV-targeting guide sequence portion
  source 1..20: mol_type = other RNA
tcgcatggagaccaccgtga

SEQ ID NO: 5241 - RNA, 20 nt, synthetic construct
  misc_feature 1..20: note = HBV-targeting guide sequence portion
  source 1..20: mol_type = other RNA
tcgccaacttacaaggcctt

SEQ ID NO: 5242 - RNA, 20 nt, synthetic construct
  misc_feature 1..20: note = HBV-targeting guide sequence portion
  source 1..20: mol_type = other RNA
tcgccagtcaggacggcagc

SEQ ID NO: 5243 - RNA, 20 nt, synthetic construct
  misc_feature 1..20: note = HBV-targeting guide sequence portion
  source 1..20: mol_type = other RNA
tcgccgcgtcgcagaagatc

SEQ ID NO: 5244 - RNA, 20 nt, synthetic construct
  misc_feature 1..20: note = HBV-targeting guide sequence portion
  source 1..20: mol_type = other RNA
tcgcctcgcagacgaagatc

SEQ ID NO: 5245 - RNA, 20 nt, synthetic construct
  misc_feature 1..20: note = HBV-targeting guide sequence portion
  source 1..20: mol_type = other RNA
tcgctggatgtgtctgcggc

SEQ ID NO: 5246 - RNA, 20 nt, synthetic construct
  misc_feature 1..20: note = HBV-targeting guide sequence portion
  source 1..20: mol_type = other RNA
tcgcttcacctctgcacgtc

SEQ ID NO: 5247 - RNA, 20 nt, synthetic construct
  misc_feature 1..20: note = HBV-targeting guide sequence portion
  source 1..20: mol_type = other RNA
tcggaaaattcctatgggag

SEQ ID NO: 5248 - RNA, 20 nt, synthetic construct
  misc_feature 1..20: note = HBV-targeting guide sequence portion
  source 1..20: mol_type = other RNA
tcggaacagggtttactgtt

SEQ ID NO: 5249 - RNA, 20 nt, synthetic construct
  misc_feature 1..20: note = HBV-targeting guide sequence portion
  source 1..20: mol_type = other RNA
tcggaacggcaggcagagaa

SEQ ID NO: 5250 - RNA, 20 nt, synthetic construct
  misc_feature 1..20: note = HBV-targeting guide sequence portion
  source 1..20: mol_type = other RNA
tcggatggaaactgcacctg

SEQ ID NO: 5251 - RNA, 20 nt, synthetic construct
  misc_feature 1..20: note = HBV-targeting guide sequence portion
  source 1..20: mol_type = other RNA
tcggcagaggagccggaaag

SEQ ID NO: 5252 - RNA, 20 nt, synthetic construct
  misc_feature 1..20: note = HBV-targeting guide sequence portion
  source 1..20: mol_type = other RNA
tcggcgctgaatcccgcgga

SEQ ID NO: 5253 - RNA, 20 nt, synthetic construct
  misc_feature 1..20: note = HBV-targeting guide sequence portion
  source 1..20: mol_type = other RNA
tcgggaaagaatcccagagg

SEQ ID NO: 5254 - RNA, 20 nt, synthetic construct
  misc_feature 1..20: note = HBV-targeting guide sequence portion
  source 1..20: mol_type = other RNA
tcgggactgacaactctgtt

SEQ ID NO: 5255 - RNA, 20 nt, synthetic construct
  misc_feature 1..20: note = HBV-targeting guide sequence portion
  source 1..20: mol_type = other RNA
tcgggatgccttggagtctc

SEQ ID NO: 5256 - RNA, 20 nt, synthetic construct
  misc_feature 1..20: note = HBV-targeting guide sequence portion
  source 1..20: mol_type = other RNA
tcgggctagggttcacccca

SEQ ID NO: 5257 - RNA, 20 nt, synthetic construct
  misc_feature 1..20: note = HBV-targeting guide sequence portion
  source 1..20: mol_type = other RNA
tcggggatctcaatgttagt

SEQ ID NO: 5258 - RNA, 20 nt, synthetic construct
  misc_feature 1..20: note = HBV-targeting guide sequence portion
  source 1..20: mol_type = other RNA
tcggtcggaacggcaggcag

SEQ ID NO: 5259 - RNA, 20 nt, synthetic construct
  misc_feature 1..20: note = HBV-targeting guide sequence portion
  source 1..20: mol_type = other RNA
tcggtcgttgacattgcaga

SEQ ID NO: 5260 - RNA, 20 nt, synthetic construct
  misc_feature 1..20: note = HBV-targeting guide sequence portion
  source 1..20: mol_type = other RNA
tcgtacggaaggaaagaagt

SEQ ID NO: 5261 - RNA, 20 nt, synthetic construct
  misc_feature 1..20: note = HBV-targeting guide sequence portion
  source 1..20: mol_type = other RNA
tcgtagggctttcccccact

SEQ ID NO: 5262 - RNA, 20 nt, synthetic construct
  misc_feature 1..20: note = HBV-targeting guide sequence portion
  source 1..20: mol_type = other RNA
tcgtcaatcttctcgaggat

SEQ ID NO: 5263 - RNA, 20 nt, synthetic construct
  misc_feature 1..20: note = HBV-targeting guide sequence portion
  source 1..20: mol_type = other RNA
tcgtccgcgggattcagcgc

SEQ ID NO: 5264 - RNA, 20 nt, synthetic construct
  misc_feature 1..20: note = HBV-targeting guide sequence portion
  source 1..20: mol_type = other RNA
tcgtcctcttctctgcctgc

SEQ ID NO: 5265 - RNA, 20 nt, synthetic construct
  misc_feature 1..20: note = HBV-targeting guide sequence portion
  source 1..20: mol_type = other RNA
tcgtcgtctaacaacacaag

SEQ ID NO: 5266 - RNA, 20 nt, synthetic construct
  misc_feature 1..20: note = HBV-targeting guide sequence portion
  source 1..20: mol_type = other RNA
tcgtctaacaacacaagtct

SEQ ID NO: 5267 - RNA, 20 nt, synthetic construct
  misc_feature 1..20: note = HBV-targeting guide sequence portion
  source 1..20: mol_type = other RNA
tcgtctgcgaggcgagggag

SEQ ID NO: 5268 - RNA, 20 nt, synthetic construct
  misc_feature 1..20: note = HBV-targeting guide sequence portion
  source 1..20: mol_type = other RNA
tcgtgcaggttctgcagggt

SEQ ID NO: 5269 - RNA, 20 nt, synthetic construct
  misc_feature 1..20: note = HBV-targeting guide sequence portion
  source 1..20: mol_type = other RNA
tcgtggtggacttctctcaa

SEQ ID NO: 5270 - RNA, 20 nt, synthetic construct
  misc_feature 1..20: note = HBV-targeting guide sequence portion
  source 1..20: mol_type = other RNA
tcgtgttacaggcggggttt

SEQ ID NO: 5271 - RNA, 20 nt, synthetic construct
  misc_feature 1..20: note = HBV-targeting guide sequence portion
  source 1..20: mol_type = other RNA
tcgttcccatggctgctagg

SEQ ID NO: 5272 - RNA, 20 nt, synthetic construct
  misc_feature 1..20: note = HBV-targeting guide sequence portion
  source 1..20: mol_type = other RNA
tcgttgacacactttccaat

SEQ ID NO: 5273 - RNA, 20 nt, synthetic construct
  misc_feature 1..20: note = HBV-targeting guide sequence portion
  source 1..20: mol_type = other RNA
tcgttgacattgcagagagt

SEQ ID NO: 5274 - RNA, 20 nt, synthetic construct
  misc_feature 1..20: note = HBV-targeting guide sequence portion
  source 1..20: mol_type = other RNA
tcgtttttgccttctgactt

SEQ ID NO: 5275 - RNA, 20 nt, synthetic construct
  misc_feature 1..20: note = HBV-targeting guide sequence portion
  source 1..20: mol_type = other RNA
tctaaattagtacccaccca

SEQ ID NO: 5276 - RNA, 20 nt, synthetic construct
  misc_feature 1..20: note = HBV-targeting guide sequence portion
  source 1..20: mol_type = other RNA
tctaacaacacaagtctccg

SEQ ID NO: 5277 - RNA, 20 nt, synthetic construct
  misc_feature 1..20: note = HBV-targeting guide sequence portion
  source 1..20: mol_type = other RNA
tctaagcaggctttcacttt

SEQ ID NO: 5278 - RNA, 20 nt, synthetic construct
  misc_feature 1..20: note = HBV-targeting guide sequence portion
  source 1..20: mol_type = other RNA
tctaatctcctcccccaact

SEQ ID NO: 5279 - RNA, 20 nt, synthetic construct
  misc_feature 1..20: note = HBV-targeting guide sequence portion
  source 1..20: mol_type = other RNA
tctaattccaggatcatcaa

SEQ ID NO: 5280 - RNA, 20 nt, synthetic construct
  misc_feature 1..20: note = HBV-targeting guide sequence portion
  source 1..20: mol_type = other RNA
tctacaccaagatattatca

SEQ ID NO: 5281 - RNA, 20 nt, synthetic construct
  misc_feature 1..20: note = HBV-targeting guide sequence portion
  source 1..20: mol_type = other RNA
tctaccaatcgccagtcagg

SEQ ID NO: 5282 - RNA, 20 nt, synthetic construct
  misc_feature 1..20: note = HBV-targeting guide sequence portion
  source 1..20: mol_type = other RNA
tctactgtacctgtctttaa

SEQ ID NO: 5283 - RNA, 20 nt, synthetic construct
  misc_feature 1..20: note = HBV-targeting guide sequence portion
  source 1..20: mol_type = other RNA
tctagaagatctcgtacgga

SEQ ID NO: 5284 - RNA, 20 nt, synthetic construct
  misc_feature 1..20: note = HBV-targeting guide sequence portion
  source 1..20: mol_type = other RNA
tctagactcgtggtggactt

SEQ ID NO: 5285 - RNA, 20 nt, synthetic construct
  misc_feature 1..20: note = HBV-targeting guide sequence portion
  source 1..20: mol_type = other RNA
tctagactctgcggtattgt

SEQ ID NO: 5286 - RNA, 20 nt, synthetic construct
  misc_feature 1..20: note = HBV-targeting guide sequence portion
  source 1..20: mol_type = other RNA
tctagataccgccgcagctc

SEQ ID NO: 5287 - RNA, 20 nt, synthetic construct
  misc_feature 1..20: note = HBV-targeting guide sequence portion
  source 1..20: mol_type = other RNA
tctagctacctgggtgggta

SEQ ID NO: 5288 - RNA, 20 nt, synthetic construct
  misc_feature 1..20: note = HBV-targeting guide sequence portion
  source 1..20: mol_type = other RNA
tctaggaccgtttctcttcc

SEQ ID NO: 5289 - RNA, 20 nt, synthetic construct
  misc_feature 1..20: note = HBV-targeting guide sequence portion
  source 1..20: mol_type = other RNA
tctagggacctagtagtcag

SEQ ID NO: 5290 - RNA, 20 nt, synthetic construct
  misc_feature 1..20: note = HBV-targeting guide sequence portion
  source 1..20: mol_type = other RNA
tctaggggacctgcctcgtc

SEQ ID NO: 5291 - RNA, 20 nt, synthetic construct
  misc_feature 1..20: note = HBV-targeting guide sequence portion
  source 1..20: mol_type = other RNA
tctagggggaactaccgtgt

SEQ ID NO: 5292 - RNA, 20 nt, synthetic construct
  misc_feature 1..20: note = HBV-targeting guide sequence portion
  source 1..20: mol_type = other RNA
tctagttaatcattacttcc

SEQ ID NO: 5293 - RNA, 20 nt, synthetic construct
  misc_feature 1..20: note = HBV-targeting guide sequence portion
  source 1..20: mol_type = other RNA
tctagtttggaagtaatgat

SEQ ID NO: 5294 - RNA, 20 nt, synthetic construct
  misc_feature 1..20: note = HBV-targeting guide sequence portion
  source 1..20: mol_type = other RNA
tctataagctggaggagtgc

SEQ ID NO: 5295 - RNA, 20 nt, synthetic construct
  misc_feature 1..20: note = HBV-targeting guide sequence portion
  source 1..20: mol_type = other RNA
tctatggaaggcgggtgttt

SEQ ID NO: 5296 - RNA, 20 nt, synthetic construct
  misc_feature 1..20: note = HBV-targeting guide sequence portion
  source 1..20: mol_type = other RNA
tctatgtatccctcctgttg

SEQ ID NO: 5297 - RNA, 20 nt, synthetic construct
  misc_feature 1..20: note = HBV-targeting guide sequence portion
  source 1..20: mol_type = other RNA
tctcaatcgccgcgtcgcag

SEQ ID NO: 5298 - RNA, 20 nt, synthetic construct
  misc_feature 1..20: note = HBV-targeting guide sequence portion
  source 1..20: mol_type = other RNA
tctcaatctcggggatctca

SEQ ID NO: 5299 - RNA, 20 nt, synthetic construct
  misc_feature 1..20: note = HBV-targeting guide sequence portion
  source 1..20: mol_type = other RNA
tctcaatgttagtatccctt

SEQ ID NO: 5300 - RNA, 20 nt, synthetic construct
  misc_feature 1..20: note = HBV-targeting guide sequence portion
  source 1..20: mol_type = other RNA
tctcaattttctagggggaa

SEQ ID NO: 5301 - RNA, 20 nt, synthetic construct
  misc_feature 1..20: note = HBV-targeting guide sequence portion
  source 1..20: mol_type = other RNA
tctcacatatcgtcaatctt

SEQ ID NO: 5302 - RNA, 20 nt, synthetic construct
  misc_feature 1..20: note = HBV-targeting guide sequence portion
  source 1..20: mol_type = other RNA
tctcactctgggatcttgca

SEQ ID NO: 5303 - RNA, 20 nt, synthetic construct
  misc_feature 1..20: note = HBV-targeting guide sequence portion
  source 1..20: mol_type = other RNA
tctcagaggtggagacagcg

SEQ ID NO: 5304 - RNA, 20 nt, synthetic construct
  misc_feature 1..20: note = HBV-targeting guide sequence portion
  source 1..20: mol_type = other RNA
tctcatctgccggaccgtgt

SEQ ID NO: 5305 - RNA, 20 nt, synthetic construct
  misc_feature 1..20: note = HBV-targeting guide sequence portion
  source 1..20: mol_type = other RNA
tctcattaactgtaagcggg

SEQ ID NO: 5306 - RNA, 20 nt, synthetic construct
  misc_feature 1..20: note = HBV-targeting guide sequence portion
  source 1..20: mol_type = other RNA
tctccacctctgagaaacac

SEQ ID NO: 5307 - RNA, 20 nt, synthetic construct
  misc_feature 1..20: note = HBV-targeting guide sequence portion
  source 1..20: mol_type = other RNA
tctccatgcgacgtgcagag

SEQ ID NO: 5308 - RNA, 20 nt, synthetic construct
  misc_feature 1..20: note = HBV-targeting guide sequence portion
  source 1..20: mol_type = other RNA
tctccatgttcagcgcaggg

SEQ ID NO: 5309 - RNA, 20 nt, synthetic construct
  misc_feature 1..20: note = HBV-targeting guide sequence portion
  source 1..20: mol_type = other RNA
tctccccagcaaagaattgc

SEQ ID NO: 5310 - RNA, 20 nt, synthetic construct
  misc_feature 1..20: note = HBV-targeting guide sequence portion
  source 1..20: mol_type = other RNA
tctcccgcaaatatacatcg

SEQ ID NO: 5311 - RNA, 20 nt, synthetic construct
  misc_feature 1..20: note = HBV-targeting guide sequence portion
  source 1..20: mol_type = other RNA
tctccctgctggtggctcca

SEQ ID NO: 5312 - RNA, 20 nt, synthetic construct
  misc_feature 1..20: note = HBV-targeting guide sequence portion
  source 1..20: mol_type = other RNA
tctccggaagtgttgatagg

SEQ ID NO: 5313 - RNA, 20 nt, synthetic construct
  misc_feature 1..20: note = HBV-targeting guide sequence portion
  source 1..20: mol_type = other RNA
tctcctcccccaactcctcc

SEQ ID NO: 5314 - RNA, 20 nt, synthetic construct
  misc_feature 1..20: note = HBV-targeting guide sequence portion
  source 1..20: mol_type = other RNA
tctcctgagcattgttcacc

SEQ ID NO: 5315 - RNA, 20 nt, synthetic construct
  misc_feature 1..20: note = HBV-targeting guide sequence portion
  source 1..20: mol_type = other RNA
tctcgaggattggggaccct

SEQ ID NO: 5316 - RNA, 20 nt, synthetic construct
  misc_feature 1..20: note = HBV-targeting guide sequence portion
  source 1..20: mol_type = other RNA
tctcgaggccgcttggggcc

SEQ ID NO: 5317 - RNA, 20 nt, synthetic construct
  misc_feature 1..20: note = HBV-targeting guide sequence portion
  source 1..20: mol_type = other RNA
tctcgggactgacaactctg

SEQ ID NO: 5318 - RNA, 20 nt, synthetic construct
  misc_feature 1..20: note = HBV-targeting guide sequence portion
  source 1..20: mol_type = other RNA
tctcggggatctcaatgtta

SEQ ID NO: 5319 - RNA, 20 nt, synthetic construct
  misc_feature 1..20: note = HBV-targeting guide sequence portion
  source 1..20: mol_type = other RNA
tctcgtacggaaggaaagaa

SEQ ID NO: 5320 - RNA, 20 nt, synthetic construct
  misc_feature 1..20: note = HBV-targeting guide sequence portion
  source 1..20: mol_type = other RNA
tctcgtttttgccttctgac

SEQ ID NO: 5321 - RNA, 20 nt, synthetic construct
  misc_feature 1..20: note = HBV-targeting guide sequence portion
  source 1..20: mol_type = other RNA
tctctcaattttctaggggg

SEQ ID NO: 5322 - RNA, 20 nt, synthetic construct
  misc_feature 1..20: note = HBV-targeting guide sequence portion
  source 1..20: mol_type = other RNA
tctctgcaatgtcaacgacc

SEQ ID NO: 5323 - RNA, 20 nt, synthetic construct
  misc_feature 1..20: note = HBV-targeting guide sequence portion
  source 1..20: mol_type = other RNA
tctctgcctgccgttccgac

SEQ ID NO: 5324 - RNA, 20 nt, synthetic construct
  misc_feature 1..20: note = HBV-targeting guide sequence portion
  source 1..20: mol_type = other RNA
tctcttaatttcatgggcta

SEQ ID NO: 5325 - RNA, 20 nt, synthetic construct
  misc_feature 1..20: note = HBV-targeting guide sequence portion
  source 1..20: mol_type = other RNA
tctcttatataaaacacccg

SEQ ID NO: 5326 - RNA, 20 nt, synthetic construct
  misc_feature 1..20: note = HBV-targeting guide sequence portion
  source 1..20: mol_type = other RNA
tctcttccaaaagtaagaca

SEQ ID NO: 5327 - RNA, 20 nt, synthetic construct
  misc_feature 1..20: note = HBV-targeting guide sequence portion
  source 1..20: mol_type = other RNA
tctcttggctcagtttacta

SEQ ID NO: 5328 - RNA, 20 nt, synthetic construct
  misc_feature 1..20: note = HBV-targeting guide sequence portion
  source 1..20: mol_type = other RNA
tctcttgttcatgtcctact

SEQ ID NO: 5329 - RNA, 20 nt, synthetic construct
  misc_feature 1..20: note = HBV-targeting guide sequence portion
  source 1..20: mol_type = other RNA
tctctttacgcggactcccc

SEQ ID NO: 5330 - RNA, 20 nt, synthetic construct
  misc_feature 1..20: note = HBV-targeting guide sequence portion
  source 1..20: mol_type = other RNA
tctctttgttttgttagggt

SEQ ID NO: 5331 - RNA, 20 nt, synthetic construct
  misc_feature 1..20: note = HBV-targeting guide sequence portion
  source 1..20: mol_type = other RNA
tctgaaacattctttgattt

SEQ ID NO: 5332 - RNA, 20 nt, synthetic construct
  misc_feature 1..20: note = HBV-targeting guide sequence portion
  source 1..20: mol_type = other RNA
tctgaactttaggcccatat

SEQ ID NO: 5333 - RNA, 20 nt, synthetic construct
  misc_feature 1..20: note = HBV-targeting guide sequence portion
  source 1..20: mol_type = other RNA
tctgaaggctgggtccaact

SEQ ID NO: 5334 - RNA, 20 nt, synthetic construct
  misc_feature 1..20: note = HBV-targeting guide sequence portion
  source 1..20: mol_type = other RNA
tctgacttctttccttccgt

SEQ ID NO: 5335 - RNA, 20 nt, synthetic construct
  misc_feature 1..20: note = HBV-targeting guide sequence portion
  source 1..20: mol_type = other RNA
tctgagaaacactcatcctc

SEQ ID NO: 5336 - RNA, 20 nt, synthetic construct
  misc_feature 1..20: note = HBV-targeting guide sequence portion
  source 1..20: mol_type = other RNA
tctgcaagatcccagagtga

SEQ ID NO: 5337 - RNA, 20 nt, synthetic construct
  misc_feature 1..20: note = HBV-targeting guide sequence portion
  source 1..20: mol_type = other RNA
tctgcaatgtcaacgaccga

SEQ ID NO: 5338 - RNA, 20 nt, synthetic construct
  misc_feature 1..20: note = HBV-targeting guide sequence portion
  source 1..20: mol_type = other RNA
tctgcacgtcgcatggagac

SEQ ID NO: 5339 - RNA, 20 nt, synthetic construct
  misc_feature 1..20: note = HBV-targeting guide sequence portion
  source 1..20: mol_type = other RNA
tctgcagggtcccgtgctgg

SEQ ID NO: 5340 - RNA, 20 nt, synthetic construct
  misc_feature 1..20: note = HBV-targeting guide sequence portion
  source 1..20: mol_type = other RNA
tctgccccatgctgtagctc

SEQ ID NO: 5341 - RNA, 20 nt, synthetic construct
  misc_feature 1..20: note = HBV-targeting guide sequence portion
  source 1..20: mol_type = other RNA
tctgccgatccatactgcgg

SEQ ID NO: 5342 - RNA, 20 nt, synthetic construct
  misc_feature 1..20: note = HBV-targeting guide sequence portion
  source 1..20: mol_type = other RNA
tctgccggaccgtgtgcact

SEQ ID NO: 5343 - RNA, 20 nt, synthetic construct
  misc_feature 1..20: note = HBV-targeting guide sequence portion
  source 1..20: mol_type = other RNA
tctgcctaatcatctcttgt

SEQ ID NO: 5344 - RNA, 20 nt, synthetic construct
  misc_feature 1..20: note = HBV-targeting guide sequence portion
  source 1..20: mol_type = other RNA
tctgcctgccgttccgaccg

SEQ ID NO: 5345 - RNA, 20 nt, synthetic construct
  misc_feature 1..20: note = HBV-targeting guide sequence portion
  source 1..20: mol_type = other RNA
tctgcgacgcggcgattgag

SEQ ID NO: 5346 - RNA, 20 nt, synthetic construct
  misc_feature 1..20: note = HBV-targeting guide sequence portion
  source 1..20: mol_type = other RNA
tctgcgaggcgagggagttc

SEQ ID NO: 5347 - RNA, 20 nt, synthetic construct
  misc_feature 1..20: note = HBV-targeting guide sequence portion
  source 1..20: mol_type = other RNA
tctgcgcaccagcaccatgc

SEQ ID NO: 5348 - RNA, 20 nt, synthetic construct
  misc_feature 1..20: note = HBV-targeting guide sequence portion
  source 1..20: mol_type = other RNA
tctgcggcgttttatcatct

SEQ ID NO: 5349 - RNA, 20 nt, synthetic construct
  misc_feature 1..20: note = HBV-targeting guide sequence portion
  source 1..20: mol_type = other RNA
tctgcggtattgtgaggatt

SEQ ID NO: 5350 - RNA, 20 nt, synthetic construct
  misc_feature 1..20: note = HBV-targeting guide sequence portion
  source 1..20: mol_type = other RNA
tctggactatcaaggtatgt

SEQ ID NO: 5351 - RNA, 20 nt, synthetic construct
  misc_feature 1..20: note = HBV-targeting guide sequence portion
  source 1..20: mol_type = other RNA
tctggagcaaacattctcgg

SEQ ID NO: 5352 - RNA, 20 nt, synthetic construct
  misc_feature 1..20: note = HBV-targeting guide sequence portion
  source 1..20: mol_type = other RNA
tctggataataaggtttaat

SEQ ID NO: 5353 - RNA, 20 nt, synthetic construct
  misc_feature 1..20: note = HBV-targeting guide sequence portion
  source 1..20: mol_type = other RNA
tctggattgttggagtttgc

SEQ ID NO: 5354 - RNA, 20 nt, synthetic construct
  misc_feature 1..20: note = HBV-targeting guide sequence portion
  source 1..20: mol_type = other RNA
tctggccagggatccttgtt

SEQ ID NO: 5355 - RNA, 20 nt, synthetic construct
  misc_feature 1..20: note = HBV-targeting guide sequence portion
  source 1..20: mol_type = other RNA
tctgggatcttgcagagttt

SEQ ID NO: 5356 - RNA, 20 nt, synthetic construct
  misc_feature 1..20: note = HBV-targeting guide sequence portion
  source 1..20: mol_type = other RNA
tctgggattctttcccgacc

SEQ ID NO: 5357 - RNA, 20 nt, synthetic construct
  misc_feature 1..20: note = HBV-targeting guide sequence portion
  source 1..20: mol_type = other RNA
tctgggttttgctgcccctt

SEQ ID NO: 5358 - RNA, 20 nt, synthetic construct
  misc_feature 1..20: note = HBV-targeting guide sequence portion
  source 1..20: mol_type = other RNA
tctgtacagcatcttgagtc

SEQ ID NO: 5359 - RNA, 20 nt, synthetic construct
  misc_feature 1..20: note = HBV-targeting guide sequence portion
  source 1..20: mol_type = other RNA
tctgtatcgggatgccttgg

SEQ ID NO: 5360 - RNA, 20 nt, synthetic construct
  misc_feature 1..20: note = HBV-targeting guide sequence portion
  source 1..20: mol_type = other RNA
tctgtcctctaattccagga

SEQ ID NO: 5361 - RNA, 20 nt, synthetic construct
  misc_feature 1..20: note = HBV-targeting guide sequence portion
  source 1..20: mol_type = other RNA
tctgtgccaagtgtttgctg

SEQ ID NO: 5362 - RNA, 20 nt, synthetic construct
  misc_feature 1..20: note = HBV-targeting guide sequence portion
  source 1..20: mol_type = other RNA
tctgtgccttctcatctgcc

SEQ ID NO: 5363 - RNA, 20 nt, synthetic construct
  misc_feature 1..20: note = HBV-targeting guide sequence portion
  source 1..20: mol_type = other RNA
tctgtgggtcaccatattct

SEQ ID NO: 5364 - RNA, 20 nt, synthetic construct
  misc_feature 1..20: note = HBV-targeting guide sequence portion
  source 1..20: mol_type = other RNA
tctgtgtaaacaatacctga

SEQ ID NO: 5365 - RNA, 20 nt, synthetic construct
  misc_feature 1..20: note = HBV-targeting guide sequence portion
  source 1..20: mol_type = other RNA
tctgttgtcctctcccgcaa

SEQ ID NO: 5366 - RNA, 20 nt, synthetic construct
  misc_feature 1..20: note = HBV-targeting guide sequence portion
  source 1..20: mol_type = other RNA
tcttaatttcatgggctatg

SEQ ID NO: 5367 - RNA, 20 nt, synthetic construct
  misc_feature 1..20: note = HBV-targeting guide sequence portion
  source 1..20: mol_type = other RNA
tcttacataagaggactctt

SEQ ID NO: 5368 - RNA, 20 nt, synthetic construct
  misc_feature 1..20: note = HBV-targeting guide sequence portion
  source 1..20: mol_type = other RNA
tcttacttttggaagagaaa

SEQ ID NO: 5369 - RNA, 20 nt, synthetic construct
  misc_feature 1..20: note = HBV-targeting guide sequence portion
  source 1..20: mol_type = other RNA
tcttatataaaacacccgcc

SEQ ID NO: 5370 - RNA, 20 nt, synthetic construct
  misc_feature 1..20: note = HBV-targeting guide sequence portion
  source 1..20: mol_type = other RNA
tcttatgtaagaccttgggc

SEQ ID NO: 5371 - RNA, 20 nt, synthetic construct
  misc_feature 1..20: note = HBV-targeting guide sequence portion
  source 1..20: mol_type = other RNA
tcttcatcctgctgctatgc

SEQ ID NO: 5372 - RNA, 20 nt, synthetic construct
  misc_feature 1..20: note = HBV-targeting guide sequence portion
  source 1..20: mol_type = other RNA
tcttccaaaagtaagacaag

SEQ ID NO: 5373 - RNA, 20 nt, synthetic construct
  misc_feature 1..20: note = HBV-targeting guide sequence portion
  source 1..20: mol_type = other RNA
tcttcctcttcatcctgctg

SEQ ID NO: 5374 - RNA, 20 nt, synthetic construct
  misc_feature 1..20: note = HBV-targeting guide sequence portion
  source 1..20: mol_type = other RNA
tcttcgtctgcgaggcgagg

SEQ ID NO: 5375 - RNA, 20 nt, synthetic construct
  misc_feature 1..20: note = HBV-targeting guide sequence portion
  source 1..20: mol_type = other RNA
tcttctaaattagtacccac

SEQ ID NO: 5376 - RNA, 20 nt, synthetic construct
  misc_feature 1..20: note = HBV-targeting guide sequence portion
  source 1..20: mol_type = other RNA
tcttctactgtacctgtctt

SEQ ID NO: 5377 - RNA, 20 nt, synthetic construct
  misc_feature 1..20: note = HBV-targeting guide sequence portion
  source 1..20: mol_type = other RNA
tcttctagataccgccgcag

SEQ ID NO: 5378 - RNA, 20 nt, synthetic construct
  misc_feature 1..20: note = HBV-targeting guide sequence portion
  source 1..20: mol_type = other RNA
tcttctaggggacctgcctc

SEQ ID NO: 5379 - RNA, 20 nt, synthetic construct
  misc_feature 1..20: note = HBV-targeting guide sequence portion
  source 1..20: mol_type = other RNA
tcttctcgaggattggggac

SEQ ID NO: 5380 - RNA, 20 nt, synthetic construct
  misc_feature 1..20: note = HBV-targeting guide sequence portion
  source 1..20: mol_type = other RNA
tcttctctgcctgccgttcc

SEQ ID NO: 5381 - RNA, 20 nt, synthetic construct
  misc_feature 1..20: note = HBV-targeting guide sequence portion
  source 1..20: mol_type = other RNA
tcttctgcgacgcggcgatt

SEQ ID NO: 5382 - RNA, 20 nt, synthetic construct
  misc_feature 1..20: note = HBV-targeting guide sequence portion
  source 1..20: mol_type = other RNA
tcttctggactatcaaggta

SEQ ID NO: 5383 - RNA, 20 nt, synthetic construct
  misc_feature 1..20: note = HBV-targeting guide sequence portion
  source 1..20: mol_type = other RNA
tcttctgggttttgctgccc

SEQ ID NO: 5384 - RNA, 20 nt, synthetic construct
  misc_feature 1..20: note = HBV-targeting guide sequence portion
  source 1..20: mol_type = other RNA
tcttcttctaggggacctgc

SEQ ID NO: 5385 - RNA, 20 nt, synthetic construct
  misc_feature 1..20: note = HBV-targeting guide sequence portion
  source 1..20: mol_type = other RNA
tcttcttgttggttcttctg

SEQ ID NO: 5386 - RNA, 20 nt, synthetic construct
  misc_feature 1..20: note = HBV-targeting guide sequence portion
  source 1..20: mol_type = other RNA
tcttgagtccctttataccg

SEQ ID NO: 5387 - RNA, 20 nt, synthetic construct
  misc_feature 1..20: note = HBV-targeting guide sequence portion
  source 1..20: mol_type = other RNA
tcttgcagagtttggtggaa

SEQ ID NO: 5388 - RNA, 20 nt, synthetic construct
  misc_feature 1..20: note = HBV-targeting guide sequence portion
  source 1..20: mol_type = other RNA
tcttgcccaaggtcttacat

SEQ ID NO: 5389 - RNA, 20 nt, synthetic construct
  misc_feature 1..20: note = HBV-targeting guide sequence portion
  source 1..20: mol_type = other RNA
tcttggactctctgcaatgt

SEQ ID NO: 5390 - RNA, 20 nt, synthetic construct
  misc_feature 1..20: note = HBV-targeting guide sequence portion
  source 1..20: mol_type = other RNA
tcttggccaaaattcgcagt

SEQ ID NO: 5391 - RNA, 20 nt, synthetic construct
  misc_feature 1..20: note = HBV-targeting guide sequence portion
  source 1..20: mol_type = other RNA
tcttggctcagtttactagt

SEQ ID NO: 5392 - RNA, 20 nt, synthetic construct
  misc_feature 1..20: note = HBV-targeting guide sequence portion
  source 1..20: mol_type = other RNA
tcttgggaacaagagctaca

SEQ ID NO: 5393 - RNA, 20 nt, synthetic construct
  misc_feature 1..20: note = HBV-targeting guide sequence portion
  source 1..20: mol_type = other RNA
tcttggtgtagatgtatatt

SEQ ID NO: 5394 - RNA, 20 nt, synthetic construct
  misc_feature 1..20: note = HBV-targeting guide sequence portion
  source 1..20: mol_type = other RNA
tcttgtcaacaaggaaaacc

SEQ ID NO: 5395 - RNA, 20 nt, synthetic construct
  misc_feature 1..20: note = HBV-targeting guide sequence portion
  source 1..20: mol_type = other RNA
tcttgtcttacttttggaag

SEQ ID NO: 5396 - RNA, 20 nt, synthetic construct
  misc_feature 1..20: note = HBV-targeting guide sequence portion
  source 1..20: mol_type = other RNA
tcttgttcatgtcctactgt

SEQ ID NO: 5397 - RNA, 20 nt, synthetic construct
  misc_feature 1..20: note = HBV-targeting guide sequence portion
  source 1..20: mol_type = other RNA
tcttgttcccaagaatatgg

SEQ ID NO: 5398 - RNA, 20 nt, synthetic construct
  misc_feature 1..20: note = HBV-targeting guide sequence portion
  source 1..20: mol_type = other RNA
tcttgttggttcttctggac

SEQ ID NO: 5399 - RNA, 20 nt, synthetic construct
  misc_feature 1..20: note = HBV-targeting guide sequence portion
  source 1..20: mol_type = other RNA
tctttaaacaaacagtcttt

SEQ ID NO: 5400 - RNA, 20 nt, synthetic construct
  misc_feature 1..20: note = HBV-targeting guide sequence portion
  source 1..20: mol_type = other RNA
tctttaaccctcattggaaa

SEQ ID NO: 5401 - RNA, 20 nt, synthetic construct
  misc_feature 1..20: note = HBV-targeting guide sequence portion
  source 1..20: mol_type = other RNA
tctttacgcggactccccgt

SEQ ID NO: 5402 - RNA, 20 nt, synthetic construct
  misc_feature 1..20: note = HBV-targeting guide sequence portion
  source 1..20: mol_type = other RNA
tctttatatgggtcaatgtc

SEQ ID NO: 5403 - RNA, 20 nt, synthetic construct
  misc_feature 1..20: note = HBV-targeting guide sequence portion
  source 1..20: mol_type = other RNA
tctttccaccagcaatcctc

SEQ ID NO: 5404 - RNA, 20 nt, synthetic construct
  misc_feature 1..20: note = HBV-targeting guide sequence portion
  source 1..20: mol_type = other RNA
tctttcccgaccaccagttg

SEQ ID NO: 5405 - RNA, 20 nt, synthetic construct
  misc_feature 1..20: note = HBV-targeting guide sequence portion
  source 1..20: mol_type = other RNA
tctttccttccgtacgagat

SEQ ID NO: 5406 - RNA, 20 nt, synthetic construct
  misc_feature 1..20: note = HBV-targeting guide sequence portion
  source 1..20: mol_type = other RNA
tctttgaagtatgcctcaag

SEQ ID NO: 5407 - RNA, 20 nt, synthetic construct
  misc_feature 1..20: note = HBV-targeting guide sequence portion
  source 1..20: mol_type = other RNA
tctttgattttgtgtatgat

SEQ ID NO: 5408 - RNA, 20 nt, synthetic construct
  misc_feature 1..20: note = HBV-targeting guide sequence portion
  source 1..20: mol_type = other RNA
tctttgctggggagaactaa

SEQ ID NO: 5409 - RNA, 20 nt, synthetic construct
  misc_feature 1..20: note = HBV-targeting guide sequence portion
  source 1..20: mol_type = other RNA
tctttgggtgtacatttaaa

SEQ ID NO: 5410 - RNA, 20 nt, synthetic construct
  misc_feature 1..20: note = HBV-targeting guide sequence portion
  source 1..20: mol_type = other RNA
tctttgtactaggaggctgt

SEQ ID NO: 5411 - RNA, 20 nt, synthetic construct
  misc_feature 1..20: note = HBV-targeting guide sequence portion
  source 1..20: mol_type = other RNA
tctttgttttgttagggttt

SEQ ID NO: 5412 - RNA, 20 nt, synthetic construct
  misc_feature 1..20: note = HBV-targeting guide sequence portion
  source 1..20: mol_type = other RNA
tcttttcctaatatacatct

SEQ ID NO: 5413 - RNA, 20 nt, synthetic construct
  misc_feature 1..20: note = HBV-targeting guide sequence portion
  source 1..20: mol_type = other RNA
tcttttctcattaactgtaa

SEQ ID NO: 5414 - RNA, 20 nt, synthetic construct
  misc_feature 1..20: note = HBV-targeting guide sequence portion
  source 1..20: mol_type = other RNA
tcttttggagtgtggattcg

SEQ ID NO: 5415 - RNA, 20 nt, synthetic construct
  misc_feature 1..20: note = HBV-targeting guide sequence portion
  source 1..20: mol_type = other RNA
tcttttgtctttgggtgtac

SEQ ID NO: 5416 - RNA, 20 nt, synthetic construct
  misc_feature 1..20: note = HBV-targeting guide sequence portion
  source 1..20: mol_type = other RNA
tgaaaaagttgcatggtgct

SEQ ID NO: 5417 - RNA, 20 nt, synthetic construct
  misc_feature 1..20: note = HBV-targeting guide sequence portion
  source 1..20: mol_type = other RNA
tgaaacattctttgattttg

SEQ ID NO: 5418 - RNA, 20 nt, synthetic construct
  misc_feature 1..20: note = HBV-targeting guide sequence portion
  source 1..20: mol_type = other RNA
tgaaaccacaatagttgtct

SEQ ID NO: 5419 - RNA, 20 nt, synthetic construct
  misc_feature 1..20: note = HBV-targeting guide sequence portion
  source 1..20: mol_type = other RNA
tgaaagccaaacagtggggg

SEQ ID NO: 5420 - RNA, 20 nt, synthetic construct
  misc_feature 1..20: note = HBV-targeting guide sequence portion
  source 1..20: mol_type = other RNA
tgaaagcctgcttagattga

SEQ ID NO: 5421 - RNA, 20 nt, synthetic construct
  misc_feature 1..20: note = HBV-targeting guide sequence portion
  source 1..20: mol_type = other RNA
tgaaattaagagaataaccc

SEQ ID NO: 5422 - RNA, 20 nt, synthetic construct
  misc_feature 1..20: note = HBV-targeting guide sequence portion
  source 1..20: mol_type = other RNA
tgaaattgattatgcctgct

SEQ ID NO: 5423 - RNA, 20 nt, synthetic construct
  misc_feature 1..20: note = HBV-targeting guide sequence portion
  source 1..20: mol_type = other RNA
tgaacaaatggcactagtaa

SEQ ID NO: 5424 - RNA, 20 nt, synthetic construct
  misc_feature 1..20: note = HBV-targeting guide sequence portion
  source 1..20: mol_type = other RNA
tgaacaagagatgattaggc

SEQ ID NO: 5425 - RNA, 20 nt, synthetic construct
  misc_feature 1..20: note = HBV-targeting guide sequence portion
  source 1..20: mol_type = other RNA
tgaacaatgctcaggagact

SEQ ID NO: 5426 - RNA, 20 nt, synthetic construct
  misc_feature 1..20: note = HBV-targeting guide sequence portion
  source 1..20: mol_type = other RNA
tgaacagtaggacatgaaca

SEQ ID NO: 5427 - RNA, 20 nt, synthetic construct
  misc_feature 1..20: note = HBV-targeting guide sequence portion
  source 1..20: mol_type = other RNA
tgaacagtttgtaggcccgc

SEQ ID NO: 5428 - RNA, 20 nt, synthetic construct
  misc_feature 1..20: note = HBV-targeting guide sequence portion
  source 1..20: mol_type = other RNA
tgaacatggagaacatcaca

SEQ ID NO: 5429 - RNA, 20 nt, synthetic construct
  misc_feature 1..20: note = HBV-targeting guide sequence portion
  source 1..20: mol_type = other RNA
tgaaccctagcccgaatgct

SEQ ID NO: 5430 - RNA, 20 nt, synthetic construct
  misc_feature 1..20: note = HBV-targeting guide sequence portion
  source 1..20: mol_type = other RNA
tgaacctttaccccgttgcc

SEQ ID NO: 5431 - RNA, 20 nt, synthetic construct
  misc_feature 1..20: note = HBV-targeting guide sequence portion
  source 1..20: mol_type = other RNA
tgaacgcccaccaattcttg

SEQ ID NO: 5432 - RNA, 20 nt, synthetic construct
  misc_feature 1..20: note = HBV-targeting guide sequence portion
  source 1..20: mol_type = other RNA
tgaactggagccaccagcag

SEQ ID NO: 5433 - RNA, 20 nt, synthetic construct
  misc_feature 1..20: note = HBV-targeting guide sequence portion
  source 1..20: mol_type = other RNA
tgaactttaggcccatatga

SEQ ID NO: 5434 - RNA, 20 nt, synthetic construct
  misc_feature 1..20: note = HBV-targeting guide sequence portion
  source 1..20: mol_type = other RNA
tgaagaggaagatgataaaa

SEQ ID NO: 5435 - RNA, 20 nt, synthetic construct
  misc_feature 1..20: note = HBV-targeting guide sequence portion
  source 1..20: mol_type = other RNA
tgaagcgaagtgcacacggt

SEQ ID NO: 5436 - RNA, 20 nt, synthetic construct
  misc_feature 1..20: note = HBV-targeting guide sequence portion
  source 1..20: mol_type = other RNA
tgaaggctgggtccaactgg

SEQ ID NO: 5437 - RNA, 20 nt, synthetic construct
  misc_feature 1..20: note = HBV-targeting guide sequence portion
  source 1..20: mol_type = other RNA
tgaagtatgcctcaaggtcg

SEQ ID NO: 5438 - RNA, 20 nt, synthetic construct
  misc_feature 1..20: note = HBV-targeting guide sequence portion
  source 1..20: mol_type = other RNA
tgaagtcccaatctggattg

SEQ ID NO: 5439 - RNA, 20 nt, synthetic construct
  misc_feature 1..20: note = HBV-targeting guide sequence portion
  source 1..20: mol_type = other RNA
tgaatacatgcatacaaggg

SEQ ID NO: 5440 - RNA, 20 nt, synthetic construct
  misc_feature 1..20: note = HBV-targeting guide sequence portion
  source 1..20: mol_type = other RNA
tgaatcccgcggacgaccca

SEQ ID NO: 5441 - RNA, 20 nt, synthetic construct
  misc_feature 1..20: note = HBV-targeting guide sequence portion
  source 1..20: mol_type = other RNA
tgaatttaggataaaaccta

SEQ ID NO: 5442 - RNA, 20 nt, synthetic construct
  misc_feature 1..20: note = HBV-targeting guide sequence portion
  source 1..20: mol_type = other RNA
tgacaactctgttgtcctct

SEQ ID NO: 5443 - RNA, 20 nt, synthetic construct
  misc_feature 1..20: note = HBV-targeting guide sequence portion
  source 1..20: mol_type = other RNA
tgacaagaatcctcacaata

SEQ ID NO: 5444 - RNA, 20 nt, synthetic construct
  misc_feature 1..20: note = HBV-targeting guide sequence portion
  source 1..20: mol_type = other RNA
tgacacactttccaatcaat

SEQ ID NO: 5445 - RNA, 20 nt, synthetic construct
  misc_feature 1..20: note = HBV-targeting guide sequence portion
  source 1..20: mol_type = other RNA
tgacactctcttatataaaa

SEQ ID NO: 5446 - RNA, 20 nt, synthetic construct
  misc_feature 1..20: note = HBV-targeting guide sequence portion
  source 1..20: mol_type = other RNA
tgacataactgactactagg

SEQ ID NO: 5447 - RNA, 20 nt, synthetic construct
  misc_feature 1..20: note = HBV-targeting guide sequence portion
  source 1..20: mol_type = other RNA
tgacatagcccatgaaatta

SEQ ID NO: 5448 - RNA, 20 nt, synthetic construct
  misc_feature 1..20: note = HBV-targeting guide sequence portion
  source 1..20: mol_type = other RNA
tgacattgcagagagtccaa

SEQ ID NO: 5449 - RNA, 20 nt, synthetic construct
  misc_feature 1..20: note = HBV-targeting guide sequence portion
  source 1..20: mol_type = other RNA
tgaccaagccccaaccagtg

SEQ ID NO: 5450 - RNA, 20 nt, synthetic construct
  misc_feature 1..20: note = HBV-targeting guide sequence portion
  source 1..20: mol_type = other RNA
tgacccacagaatgaggcgc

SEQ ID NO: 5451 - RNA, 20 nt, synthetic construct
  misc_feature 1..20: note = HBV-targeting guide sequence portion
  source 1..20: mol_type = other RNA
tgacccatataaagaatttg

SEQ ID NO: 5452 - RNA, 20 nt, synthetic construct
  misc_feature 1..20: note = HBV-targeting guide sequence portion
  source 1..20: mol_type = other RNA
tgacgatatgtgagaggcag

SEQ ID NO: 5453 - RNA, 20 nt, synthetic construct
  misc_feature 1..20: note = HBV-targeting guide sequence portion
  source 1..20: mol_type = other RNA
tgactactaggtccctagat

SEQ ID NO: 5454 - RNA, 20 nt, synthetic construct
  misc_feature 1..20: note = HBV-targeting guide sequence portion
  source 1..20: mol_type = other RNA
tgactctagctacctgggtg

SEQ ID NO: 5455 - RNA, 20 nt, synthetic construct
  misc_feature 1..20: note = HBV-targeting guide sequence portion
  source 1..20: mol_type = other RNA
tgactggcgattggtagagg

SEQ ID NO: 5456 - RNA, 20 nt, synthetic construct
  misc_feature 1..20: note = HBV-targeting guide sequence portion
  source 1..20: mol_type = other RNA
tgacttctttccttccgtac

SEQ ID NO: 5457 - RNA, 20 nt, synthetic construct
  misc_feature 1..20: note = HBV-targeting guide sequence portion
  source 1..20: mol_type = other RNA
tgagaaaagacggttgaaat

SEQ ID NO: 5458 - RNA, 20 nt, synthetic construct
  misc_feature 1..20: note = HBV-targeting guide sequence portion
  source 1..20: mol_type = other RNA
tgagaaacactcatcctcag

SEQ ID NO: 5459 - RNA, 20 nt, synthetic construct
  misc_feature 1..20: note = HBV-targeting guide sequence portion
  source 1..20: mol_type = other RNA
tgagaaggcacagacgggga

SEQ ID NO: 5460 - RNA, 20 nt, synthetic construct
  misc_feature 1..20: note = HBV-targeting guide sequence portion
  source 1..20: mol_type = other RNA
tgagagaagtccaccacgag

SEQ ID NO: 5461 - RNA, 20 nt, synthetic construct
  misc_feature 1..20: note = HBV-targeting guide sequence portion
  source 1..20: mol_type = other RNA
tgagaggcagtagtcggaac

SEQ ID NO: 5462 - RNA, 20 nt, synthetic construct
  misc_feature 1..20: note = HBV-targeting guide sequence portion
  source 1..20: mol_type = other RNA
tgagaggcctgtatctccct

SEQ ID NO: 5463 - RNA, 20 nt, synthetic construct
  misc_feature 1..20: note = HBV-targeting guide sequence portion
  source 1..20: mol_type = other RNA
tgagatccccgagattgaga

SEQ ID NO: 5464 - RNA, 20 nt, synthetic construct
  misc_feature 1..20: note = HBV-targeting guide sequence portion
  source 1..20: mol_type = other RNA
tgagatcttcgtctgcgagg

SEQ ID NO: 5465 - RNA, 20 nt, synthetic construct
  misc_feature 1..20: note = HBV-targeting guide sequence portion
  source 1..20: mol_type = other RNA
tgagatcttctgcgacgcgg

SEQ ID NO: 5466 - RNA, 20 nt, synthetic construct
  misc_feature 1..20: note = HBV-targeting guide sequence portion
  source 1..20: mol_type = other RNA
tgagcaggagtcgtgcaggt

SEQ ID NO: 5467 - RNA, 20 nt, synthetic construct
  misc_feature 1..20: note = HBV-targeting guide sequence portion
  source 1..20: mol_type = other RNA
tgagcattgttcacctcacc

SEQ ID NO: 5468 - RNA, 20 nt, synthetic construct
  misc_feature 1..20: note = HBV-targeting guide sequence portion
  source 1..20: mol_type = other RNA
tgagccaagagaaacgggct

SEQ ID NO: 5469 - RNA, 20 nt, synthetic construct
  misc_feature 1..20: note = HBV-targeting guide sequence portion
  source 1..20: mol_type = other RNA
tgagcctgagggctccaccc

SEQ ID NO: 5470 - RNA, 20 nt, synthetic construct
  misc_feature 1..20: note = HBV-targeting guide sequence portion
  source 1..20: mol_type = other RNA
tgaggatgagtgtttctcag

SEQ ID NO: 5471 - RNA, 20 nt, synthetic construct
  misc_feature 1..20: note = HBV-targeting guide sequence portion
  source 1..20: mol_type = other RNA
tgaggattcttgtcaacaag

SEQ ID NO: 5472 - RNA, 20 nt, synthetic construct
  misc_feature 1..20: note = HBV-targeting guide sequence portion
  source 1..20: mol_type = other RNA
tgaggcatacttcaaagact

SEQ ID NO: 5473 - RNA, 20 nt, synthetic construct
  misc_feature 1..20: note = HBV-targeting guide sequence portion
  source 1..20: mol_type = other RNA
tgaggcatagcagcaggatg

SEQ ID NO: 5474 - RNA, 20 nt, synthetic construct
  misc_feature 1..20: note = HBV-targeting guide sequence portion
  source 1..20: mol_type = other RNA
tgaggcccactcccatagga

SEQ ID NO: 5475 - RNA, 20 nt, synthetic construct
  misc_feature 1..20: note = HBV-targeting guide sequence portion
  source 1..20: mol_type = other RNA
tgaggcgctatgtgttgaca

SEQ ID NO: 5476 - RNA, 20 nt, synthetic construct
  misc_feature 1..20: note = HBV-targeting guide sequence portion
  source 1..20: mol_type = other RNA
tgagggctccaccccaaaag

SEQ ID NO: 5477 - RNA, 20 nt, synthetic construct
  misc_feature 1..20: note = HBV-targeting guide sequence portion
  source 1..20: mol_type = other RNA
tgagggttaaagacaggtac

SEQ ID NO: 5478 - RNA, 20 nt, synthetic construct
  misc_feature 1..20: note = HBV-targeting guide sequence portion
  source 1..20: mol_type = other RNA
tgaggtgaacaatgctcagg

SEQ ID NO: 5479 - RNA, 20 nt, synthetic construct
  misc_feature 1..20: note = HBV-targeting guide sequence portion
  source 1..20: mol_type = other RNA
tgagtccaagggatactaac

SEQ ID NO: 5480 - RNA, 20 nt, synthetic construct
  misc_feature 1..20: note = HBV-targeting guide sequence portion
  source 1..20: mol_type = other RNA
tgagtccctttataccgctg

SEQ ID NO: 5481 - RNA, 20 nt, synthetic construct
  misc_feature 1..20: note = HBV-targeting guide sequence portion
  source 1..20: mol_type = other RNA
tgagtgattggaggttgggg

SEQ ID NO: 5482 - RNA, 20 nt, synthetic construct
  misc_feature 1..20: note = HBV-targeting guide sequence portion
  source 1..20: mol_type = other RNA
tgagtgcagtatggtgaggt

SEQ ID NO: 5483 - RNA, 20 nt, synthetic construct
  misc_feature 1..20: note = HBV-targeting guide sequence portion
  source 1..20: mol_type = other RNA
tgagtgttgacataactgac

SEQ ID NO: 5484 - RNA, 20 nt, synthetic construct
  misc_feature 1..20: note = HBV-targeting guide sequence portion
  source 1..20: mol_type = other RNA
tgagtgtttctcagaggtgg

SEQ ID NO: 5485 - RNA, 20 nt, synthetic construct
  misc_feature 1..20: note = HBV-targeting guide sequence portion
  source 1..20: mol_type = other RNA
tgataaaacgccgcagacac

SEQ ID NO: 5486 - RNA, 20 nt, synthetic construct
  misc_feature 1..20: note = HBV-targeting guide sequence portion
  source 1..20: mol_type = other RNA
tgataatatcttggtgtaga

SEQ ID NO: 5487 - RNA, 20 nt, synthetic construct
  misc_feature 1..20: note = HBV-targeting guide sequence portion
  source 1..20: mol_type = other RNA
tgataggataggggcatttg

SEQ ID NO: 5488 - RNA, 20 nt, synthetic construct
  misc_feature 1..20: note = HBV-targeting guide sequence portion
  source 1..20: mol_type = other RNA
tgatagtccagaagaaccaa

SEQ ID NO: 5489 - RNA, 20 nt, synthetic construct
  misc_feature 1..20: note = HBV-targeting guide sequence portion
  source 1..20: mol_type = other RNA
tgatccccaacaatcaatga

SEQ ID NO: 5490 - RNA, 20 nt, synthetic construct
  misc_feature 1..20: note = HBV-targeting guide sequence portion
  source 1..20: mol_type = other RNA
tgatcctggaattagaggac

SEQ ID NO: 5491 - RNA, 20 nt, synthetic construct
  misc_feature 1..20: note = HBV-targeting guide sequence portion
  source 1..20: mol_type = other RNA
tgatcttctaaattagtacc

SEQ ID NO: 5492 - RNA, 20 nt, synthetic construct
  misc_feature 1..20: note = HBV-targeting guide sequence portion
  source 1..20: mol_type = other RNA
tgatctttgtactaggaggc

SEQ ID NO: 5493 - RNA, 20 nt, synthetic construct
  misc_feature 1..20: note = HBV-targeting guide sequence portion
  source 1..20: mol_type = other RNA
tgatgatcctggaattagag

SEQ ID NO: 5494 - RNA, 20 nt, synthetic construct
  misc_feature 1..20: note = HBV-targeting guide sequence portion
  source 1..20: mol_type = other RNA
tgatgcaacccccactggtt

SEQ ID NO: 5495 - RNA, 20 nt, synthetic construct
  misc_feature 1..20: note = HBV-targeting guide sequence portion
  source 1..20: mol_type = other RNA
tgatggcctatgaccaagcc

SEQ ID NO: 5496 - RNA, 20 nt, synthetic construct
  misc_feature 1..20: note = HBV-targeting guide sequence portion
  source 1..20: mol_type = other RNA
tgatgggatgggaatacagg

SEQ ID NO: 5497 - RNA, 20 nt, synthetic construct
  misc_feature 1..20: note = HBV-targeting guide sequence portion
  source 1..20: mol_type = other RNA
tgatgtgatgttctccatgt

SEQ ID NO: 5498 - RNA, 20 nt, synthetic construct
  misc_feature 1..20: note = HBV-targeting guide sequence portion
  source 1..20: mol_type = other RNA
tgatgtgattttgtggcaat

SEQ ID NO: 5499 - RNA, 20 nt, synthetic construct
  misc_feature 1..20: note = HBV-targeting guide sequence portion
  source 1..20: mol_type = other RNA
tgatgtggtattgggggcca

SEQ ID NO: 5500 - RNA, 20 nt, synthetic construct
  misc_feature 1..20: note = HBV-targeting guide sequence portion
  source 1..20: mol_type = other RNA
tgatgttctccatgttcagc

SEQ ID NO: 5501 - RNA, 20 nt, synthetic construct
  misc_feature 1..20: note = HBV-targeting guide sequence portion
  source 1..20: mol_type = other RNA
tgattaactagatgttctgg

SEQ ID NO: 5502 - RNA, 20 nt, synthetic construct
  misc_feature 1..20: note = HBV-targeting guide sequence portion
  source 1..20: mol_type = other RNA
tgattaggcagaggtgaaaa

SEQ ID NO: 5503 - RNA, 20 nt, synthetic construct
  misc_feature 1..20: note = HBV-targeting guide sequence portion
  source 1..20: mol_type = other RNA
tgattatgcctgctaggttt

SEQ ID NO: 5504 - RNA, 20 nt, synthetic construct
  misc_feature 1..20: note = HBV-targeting guide sequence portion
  source 1..20: mol_type = other RNA
tgattggaaagtgtgtcaac

SEQ ID NO: 5505 - RNA, 20 nt, synthetic construct
  misc_feature 1..20: note = HBV-targeting guide sequence portion
  source 1..20: mol_type = other RNA
tgattggaggttggggactg

SEQ ID NO: 5506 - RNA, 20 nt, synthetic construct
  misc_feature 1..20: note = HBV-targeting guide sequence portion
  source 1..20: mol_type = other RNA
tgattgttggggatcattgc

SEQ ID NO: 5507 - RNA, 20 nt, synthetic construct
  misc_feature 1..20: note = HBV-targeting guide sequence portion
  source 1..20: mol_type = other RNA
tgattttgtggcaatgatcc

SEQ ID NO: 5508 - RNA, 20 nt, synthetic construct
  misc_feature 1..20: note = HBV-targeting guide sequence portion
  source 1..20: mol_type = other RNA
tgattttgtgtatgatgtga

SEQ ID NO: 5509 - RNA, 20 nt, synthetic construct
  misc_feature 1..20: note = HBV-targeting guide sequence portion
  source 1..20: mol_type = other RNA
tgcaaaccttgccagcaaat

SEQ ID NO: 5510 - RNA, 20 nt, synthetic construct
  misc_feature 1..20: note = HBV-targeting guide sequence portion
  source 1..20: mol_type = other RNA
tgcaacccccactggttggg

SEQ ID NO: 5511 - RNA, 20 nt, synthetic construct
  misc_feature 1..20: note = HBV-targeting guide sequence portion
  source 1..20: mol_type = other RNA
tgcaactttttcacctctgc

SEQ ID NO: 5512 - RNA, 20 nt, synthetic construct
  misc_feature 1..20: note = HBV-targeting guide sequence portion
  source 1..20: mol_type = other RNA
tgcaagatcccagagtgaga

SEQ ID NO: 5513 - RNA, 20 nt, synthetic construct
  misc_feature 1..20: note = HBV-targeting guide sequence portion
  source 1..20: mol_type = other RNA
tgcaatgtcaacgaccgacc

SEQ ID NO: 5514 - RNA, 20 nt, synthetic construct
  misc_feature 1..20: note = HBV-targeting guide sequence portion
  source 1..20: mol_type = other RNA
tgcacacggtccggcagatg

SEQ ID NO: 5515 - RNA, 20 nt, synthetic construct
  misc_feature 1..20: note = HBV-targeting guide sequence portion
  source 1..20: mol_type = other RNA
tgcacctgtattcccatccc

SEQ ID NO: 5516 - RNA, 20 nt, synthetic construct
  misc_feature 1..20: note = HBV-targeting guide sequence portion
  source 1..20: mol_type = other RNA
tgcacgactcctgctcaagg

SEQ ID NO: 5517 - RNA, 20 nt, synthetic construct
  misc_feature 1..20: note = HBV-targeting guide sequence portion
  source 1..20: mol_type = other RNA
tgcacgtcgcatggagacca

SEQ ID NO: 5518 - RNA, 20 nt, synthetic construct
  misc_feature 1..20: note = HBV-targeting guide sequence portion
  source 1..20: mol_type = other RNA
tgcactcaggcaagcaattc

SEQ ID NO: 5519 - RNA, 20 nt, synthetic construct
  misc_feature 1..20: note = HBV-targeting guide sequence portion
  source 1..20: mol_type = other RNA
tgcacttcgcttcacctctg

SEQ ID NO: 5520 - RNA, 20 nt, synthetic construct
  misc_feature 1..20: note = HBV-targeting guide sequence portion
  source 1..20: mol_type = other RNA
tgcagaacctgcacgactcc

SEQ ID NO: 5521 - RNA, 20 nt, synthetic construct
  misc_feature 1..20: note = HBV-targeting guide sequence portion
  source 1..20: mol_type = other RNA
tgcagagagtccaagagtcc

SEQ ID NO: 5522 - RNA, 20 nt, synthetic construct
  misc_feature 1..20: note = HBV-targeting guide sequence portion
  source 1..20: mol_type = other RNA
tgcagaggtgaagcgaagtg

SEQ ID NO: 5523 - RNA, 20 nt, synthetic construct
  misc_feature 1..20: note = HBV-targeting guide sequence portion
  source 1..20: mol_type = other RNA
tgcagagtttggtggaaggt

SEQ ID NO: 5524 - RNA, 20 nt, synthetic construct
  misc_feature 1..20: note = HBV-targeting guide sequence portion
  source 1..20: mol_type = other RNA
tgcagggtcccgtgctggtg

SEQ ID NO: 5525 - RNA, 20 nt, synthetic construct
  misc_feature 1..20: note = HBV-targeting guide sequence portion
  source 1..20: mol_type = other RNA
tgcaggttctgcagggtccc

SEQ ID NO: 5526 - RNA, 20 nt, synthetic construct
  misc_feature 1..20: note = HBV-targeting guide sequence portion
  source 1..20: mol_type = other RNA
tgcagtatggtgaggtgaac

SEQ ID NO: 5527 - RNA, 20 nt, synthetic construct
  misc_feature 1..20: note = HBV-targeting guide sequence portion
  source 1..20: mol_type = other RNA
tgcagtttccatccgaaggt

SEQ ID NO: 5528 - RNA, 20 nt, synthetic construct
  misc_feature 1..20: note = HBV-targeting guide sequence portion
  source 1..20: mol_type = other RNA
tgcatacaagggcattaaag

SEQ ID NO: 5529 - RNA, 20 nt, synthetic construct
  misc_feature 1..20: note = HBV-targeting guide sequence portion
  source 1..20: mol_type = other RNA
tgcatcagcaaacacttggc

SEQ ID NO: 5530 - RNA, 20 nt, synthetic construct
  misc_feature 1..20: note = HBV-targeting guide sequence portion
  source 1..20: mol_type = other RNA
tgcatggcctgaggatgagt

SEQ ID NO: 5531 - RNA, 20 nt, synthetic construct
  misc_feature 1..20: note = HBV-targeting guide sequence portion
  source 1..20: mol_type = other RNA
tgcatggtgctggtgcgcag

SEQ ID NO: 5532 - RNA, 20 nt, synthetic construct
  misc_feature 1..20: note = HBV-targeting guide sequence portion
  source 1..20: mol_type = other RNA
tgcatgtattcaatctaagc

SEQ ID NO: 5533 - RNA, 20 nt, synthetic construct
  misc_feature 1..20: note = HBV-targeting guide sequence portion
  source 1..20: mol_type = other RNA
tgcattatgccctgagcctg

SEQ ID NO: 5534 - RNA, 20 nt, synthetic construct
  misc_feature 1..20: note = HBV-targeting guide sequence portion
  source 1..20: mol_type = other RNA
tgccaactggatcctgcgcg

SEQ ID NO: 5535 - RNA, 20 nt, synthetic construct
  misc_feature 1..20: note = HBV-targeting guide sequence portion
  source 1..20: mol_type = other RNA
tgccaagtgtttgctgatgc

SEQ ID NO: 5536 - RNA, 20 nt, synthetic construct
  misc_feature 1..20: note = HBV-targeting guide sequence portion
  source 1..20: mol_type = other RNA
tgccacaaaatcacatcata

SEQ ID NO: 5537 - RNA, 20 nt, synthetic construct
  misc_feature 1..20: note = HBV-targeting guide sequence portion
  source 1..20: mol_type = other RNA
tgccagcaaatccgcctcct

SEQ ID NO: 5538 - RNA, 20 nt, synthetic construct
  misc_feature 1..20: note = HBV-targeting guide sequence portion
  source 1..20: mol_type = other RNA
tgccaggcaacggccaggtc

SEQ ID NO: 5539 - RNA, 20 nt, synthetic construct
  misc_feature 1..20: note = HBV-targeting guide sequence portion
  source 1..20: mol_type = other RNA
tgccatttgttcagtggttc

SEQ ID NO: 5540 - RNA, 20 nt, synthetic construct
  misc_feature 1..20: note = HBV-targeting guide sequence portion
  source 1..20: mol_type = other RNA
tgcccaaggtcttacataag

SEQ ID NO: 5541 - RNA, 20 nt, synthetic construct
  misc_feature 1..20: note = HBV-targeting guide sequence portion
  source 1..20: mol_type = other RNA
tgccccatgctgtagctctt

SEQ ID NO: 5542 - RNA, 20 nt, synthetic construct
  misc_feature 1..20: note = HBV-targeting guide sequence portion
  source 1..20: mol_type = other RNA
tgcccctatcctatcaacac

SEQ ID NO: 5543 - RNA, 20 nt, synthetic construct
  misc_feature 1..20: note = HBV-targeting guide sequence portion
  source 1..20: mol_type = other RNA
tgccccttttacacaatgtg

SEQ ID NO: 5544 - RNA, 20 nt, synthetic construct
  misc_feature 1..20: note = HBV-targeting guide sequence portion
  source 1..20: mol_type = other RNA
tgccctaaagccacccaagg

SEQ ID NO: 5545 - RNA, 20 nt, synthetic construct
  misc_feature 1..20: note = HBV-targeting guide sequence portion
  source 1..20: mol_type = other RNA
tgccctgagcctgagggctc

SEQ ID NO: 5546 - RNA, 20 nt, synthetic construct
  misc_feature 1..20: note = HBV-targeting guide sequence portion
  source 1..20: mol_type = other RNA
tgcccttggataagggtatt

SEQ ID NO: 5547 - RNA, 20 nt, synthetic construct
  misc_feature 1..20: note = HBV-targeting guide sequence portion
  source 1..20: mol_type = other RNA
tgcccttgtatgcatgtatt

SEQ ID NO: 5548 - RNA, 20 nt, synthetic construct
  misc_feature 1..20: note = HBV-targeting guide sequence portion
  source 1..20: mol_type = other RNA
tgccgatccatactgcggaa

SEQ ID NO: 5549 - RNA, 20 nt, synthetic construct
  misc_feature 1..20: note = HBV-targeting guide sequence portion
  source 1..20: mol_type = other RNA
tgccggaccgtgtgcacttc

SEQ ID NO: 5550 - RNA, 20 nt, synthetic construct
  misc_feature 1..20: note = HBV-targeting guide sequence portion
  source 1..20: mol_type = other RNA
tgccgtcctgactggcgatt

SEQ ID NO: 5551 - RNA, 20 nt, synthetic construct
  misc_feature 1..20: note = HBV-targeting guide sequence portion
  source 1..20: mol_type = other RNA
tgccgttccgaccgaccacg

SEQ ID NO: 5552 - RNA, 20 nt, synthetic construct
  misc_feature 1..20: note = HBV-targeting guide sequence portion
  source 1..20: mol_type = other RNA
tgcctaatcatctcttgttc

SEQ ID NO: 5553 - RNA, 20 nt, synthetic construct
  misc_feature 1..20: note = HBV-targeting guide sequence portion
  source 1..20: mol_type = other RNA
tgcctacagcctcctagtac

SEQ ID NO: 5554 - RNA, 20 nt, synthetic construct
  misc_feature 1..20: note = HBV-targeting guide sequence portion
  source 1..20: mol_type = other RNA
tgcctcaaggtcggtcgttg

SEQ ID NO: 5555 - RNA, 20 nt, synthetic construct
  misc_feature 1..20: note = HBV-targeting guide sequence portion
  source 1..20: mol_type = other RNA
tgcctcatcttcttgttggt

SEQ ID NO: 5556 - RNA, 20 nt, synthetic construct
  misc_feature 1..20: note = HBV-targeting guide sequence portion
  source 1..20: mol_type = other RNA
tgcctcgtcgtctaacaaca

SEQ ID NO: 5557 - RNA, 20 nt, synthetic construct
  misc_feature 1..20: note = HBV-targeting guide sequence portion
  source 1..20: mol_type = other RNA
tgcctctaccaatcgccagt

SEQ ID NO: 5558 - RNA, 20 nt, synthetic construct
  misc_feature 1..20: note = HBV-targeting guide sequence portion
  source 1..20: mol_type = other RNA
tgcctctcacatatcgtcaa

SEQ ID NO: 5559 - RNA, 20 nt, synthetic construct
  misc_feature 1..20: note = HBV-targeting guide sequence portion
  source 1..20: mol_type = other RNA
tgcctgagtgcagtatggtg

SEQ ID NO: 5560 - RNA, 20 nt, synthetic construct
  misc_feature 1..20: note = HBV-targeting guide sequence portion
  source 1..20: mol_type = other RNA
tgcctgccgttccgaccgac

SEQ ID NO: 5561 - RNA, 20 nt, synthetic construct
  misc_feature 1..20: note = HBV-targeting guide sequence portion
  source 1..20: mol_type = other RNA
tgcctgctaggttttatcct

SEQ ID NO: 5562 - RNA, 20 nt, synthetic construct
  misc_feature 1..20: note = HBV-targeting guide sequence portion
  source 1..20: mol_type = other RNA
tgcctggcaacggggtaaag

SEQ ID NO: 5563 - RNA, 20 nt, synthetic construct
  misc_feature 1..20: note = HBV-targeting guide sequence portion
  source 1..20: mol_type = other RNA
tgccttctcatctgccggac

SEQ ID NO: 5564 - RNA, 20 nt, synthetic construct
  misc_feature 1..20: note = HBV-targeting guide sequence portion
  source 1..20: mol_type = other RNA
tgccttctgacttctttcct

SEQ ID NO: 5565 - RNA, 20 nt, synthetic construct
  misc_feature 1..20: note = HBV-targeting guide sequence portion
  source 1..20: mol_type = other RNA
tgccttggagtctcctgagc

SEQ ID NO: 5566 - RNA, 20 nt, synthetic construct
  misc_feature 1..20: note = HBV-targeting guide sequence portion
  source 1..20: mol_type = other RNA
tgccttgggtggctttaggg

SEQ ID NO: 5567 - RNA, 20 nt, synthetic construct
  misc_feature 1..20: note = HBV-targeting guide sequence portion
  source 1..20: mol_type = other RNA
tgcgaatccacactccaaaa

SEQ ID NO: 5568 - RNA, 20 nt, synthetic construct
  misc_feature 1..20: note = HBV-targeting guide sequence portion
  source 1..20: mol_type = other RNA
tgcgaattttggccaagaca

SEQ ID NO: 5569 - RNA, 20 nt, synthetic construct
  misc_feature 1..20: note = HBV-targeting guide sequence portion
  source 1..20: mol_type = other RNA
tgcgacgcggcgattgagat

SEQ ID NO: 5570 - RNA, 20 nt, synthetic construct
  misc_feature 1..20: note = HBV-targeting guide sequence portion
  source 1..20: mol_type = other RNA
tgcgacgtgcagaggtgaag

SEQ ID NO: 5571 - RNA, 20 nt, synthetic construct
  misc_feature 1..20: note = HBV-targeting guide sequence portion
  source 1..20: mol_type = other RNA
tgcgagcaaaacaagcggct

SEQ ID NO: 5572 - RNA, 20 nt, synthetic construct
  misc_feature 1..20: note = HBV-targeting guide sequence portion
  source 1..20: mol_type = other RNA
tgcgaggcgagggagttctt

SEQ ID NO: 5573 - RNA, 20 nt, synthetic construct
  misc_feature 1..20: note = HBV-targeting guide sequence portion
  source 1..20: mol_type = other RNA
tgcgcaccagcaccatgcaa

SEQ ID NO: 5574 - RNA, 20 nt, synthetic construct
  misc_feature 1..20: note = HBV-targeting guide sequence portion
  source 1..20: mol_type = other RNA
tgcgcagaccaatttatgcc

SEQ ID NO: 5575 - RNA, 20 nt, synthetic construct
  misc_feature 1..20: note = HBV-targeting guide sequence portion
  source 1..20: mol_type = other RNA
tgcgccccgtggtcggtcgg

SEQ ID NO: 5576 - RNA, 20 nt, synthetic construct
  misc_feature 1..20: note = HBV-targeting guide sequence portion
  source 1..20: mol_type = other RNA
tgcgcgggacgtcctttgtt

SEQ ID NO: 5577 - RNA, 20 nt, synthetic construct
  misc_feature 1..20: note = HBV-targeting guide sequence portion
  source 1..20: mol_type = other RNA
tgcgctgaacatggagaaca

SEQ ID NO: 5578 - RNA, 20 nt, synthetic construct
  misc_feature 1..20: note = HBV-targeting guide sequence portion
  source 1..20: mol_type = other RNA
tgcgctgatggcctatgacc

SEQ ID NO: 5579 - RNA, 20 nt, synthetic construct
  misc_feature 1..20: note = HBV-targeting guide sequence portion
  source 1..20: mol_type = other RNA
tgcggaactcctagccgctt

SEQ ID NO: 5580 - RNA, 20 nt, synthetic construct
  misc_feature 1..20: note = HBV-targeting guide sequence portion
  source 1..20: mol_type = other RNA
tgcggcggtatctagaagat

SEQ ID NO: 5581 - RNA, 20 nt, synthetic construct
  misc_feature 1..20: note = HBV-targeting guide sequence portion
  source 1..20: mol_type = other RNA
tgcggcgttttatcatcttc

SEQ ID NO: 5582 - RNA, 20 nt, synthetic construct
  misc_feature 1..20: note = HBV-targeting guide sequence portion
  source 1..20: mol_type = other RNA
tgcgggagaggacaacagag

SEQ ID NO: 5583 - RNA, 20 nt, synthetic construct
  misc_feature 1..20: note = HBV-targeting guide sequence portion
  source 1..20: mol_type = other RNA
tgcggtattgtgaggattct

SEQ ID NO: 5584 - RNA, 20 nt, synthetic construct
  misc_feature 1..20: note = HBV-targeting guide sequence portion
  source 1..20: mol_type = other RNA
tgcggtggggtgaaccctag

SEQ ID NO: 5585 - RNA, 20 nt, synthetic construct
  misc_feature 1..20: note = HBV-targeting guide sequence portion
  source 1..20: mol_type = other RNA
tgcgtggaacctttccggct

SEQ ID NO: 5586 - RNA, 20 nt, synthetic construct
  misc_feature 1..20: note = HBV-targeting guide sequence portion
  source 1..20: mol_type = other RNA
tgctaggctgtgctgccaac

SEQ ID NO: 5587 - RNA, 20 nt, synthetic construct
  misc_feature 1..20: note = HBV-targeting guide sequence portion
  source 1..20: mol_type = other RNA
tgctaggttttatcctaaat

SEQ ID NO: 5588 - RNA, 20 nt, synthetic construct
  misc_feature 1..20: note = HBV-targeting guide sequence portion
  source 1..20: mol_type = other RNA
tgctatgcctcatcttcttg

SEQ ID NO: 5589 - RNA, 20 nt, synthetic construct
  misc_feature 1..20: note = HBV-targeting guide sequence portion
  source 1..20: mol_type = other RNA
tgctcaaggaacctctatgt

SEQ ID NO: 5590 - RNA, 20 nt, synthetic construct
  misc_feature 1..20: note = HBV-targeting guide sequence portion
  source 1..20: mol_type = other RNA
tgctcaggagactccaaggc

SEQ ID NO: 5591 - RNA, 20 nt, synthetic construct
  misc_feature 1..20: note = HBV-targeting guide sequence portion
  source 1..20: mol_type = other RNA
tgctccagaccggctgcgag

SEQ ID NO: 5592 - RNA, 20 nt, synthetic construct
  misc_feature 1..20: note = HBV-targeting guide sequence portion
  source 1..20: mol_type = other RNA
tgctccagctcctaccttgt

SEQ ID NO: 5593 - RNA, 20 nt, synthetic construct
  misc_feature 1..20: note = HBV-targeting guide sequence portion
  source 1..20: mol_type = other RNA
tgctcgcagccggtctggag

SEQ ID NO: 5594 - RNA, 20 nt, synthetic construct
  misc_feature 1..20: note = HBV-targeting guide sequence portion
  source 1..20: mol_type = other RNA
tgctcgtgttacaggcgggg

SEQ ID NO: 5595 - RNA, 20 nt, synthetic construct
  misc_feature 1..20: note = HBV-targeting guide sequence portion
  source 1..20: mol_type = other RNA
tgctctgaaggctgggtcca

SEQ ID NO: 5596 - RNA, 20 nt, synthetic construct
  misc_feature 1..20: note = HBV-targeting guide sequence portion
  source 1..20: mol_type = other RNA
tgctgatgcaacccccactg

SEQ ID NO: 5597 - RNA, 20 nt, synthetic construct
  misc_feature 1..20: note = HBV-targeting guide sequence portion
  source 1..20: mol_type = other RNA
tgctgccaactggatcctgc

SEQ ID NO: 5598 - RNA, 20 nt, synthetic construct
  misc_feature 1..20: note = HBV-targeting guide sequence portion
  source 1..20: mol_type = other RNA
tgctgccccttttacacaat

SEQ ID NO: 5599 - RNA, 20 nt, synthetic construct
  misc_feature 1..20: note = HBV-targeting guide sequence portion
  source 1..20: mol_type = other RNA
tgctgctatgcctcatcttc

SEQ ID NO: 5600 - RNA, 20 nt, synthetic construct
  misc_feature 1..20: note = HBV-targeting guide sequence portion
  source 1..20: mol_type = other RNA
tgctggcaaggtttgcatta

SEQ ID NO: 5601 - RNA, 20 nt, synthetic construct
  misc_feature 1..20: note = HBV-targeting guide sequence portion
  source 1..20: mol_type = other RNA
tgctggggagaactaatgac

SEQ ID NO: 5602 - RNA, 20 nt, synthetic construct
  misc_feature 1..20: note = HBV-targeting guide sequence portion
  source 1..20: mol_type = other RNA
tgctggtgcgcagaccaatt

SEQ ID NO: 5603 - RNA, 20 nt, synthetic construct
  misc_feature 1..20: note = HBV-targeting guide sequence portion
  source 1..20: mol_type = other RNA
tgctggtggaaagattctgc

SEQ ID NO: 5604 - RNA, 20 nt, synthetic construct
  misc_feature 1..20: note = HBV-targeting guide sequence portion
  source 1..20: mol_type = other RNA
tgctggtggctccagttcag

SEQ ID NO: 5605 - RNA, 20 nt, synthetic construct
  misc_feature 1..20: note = HBV-targeting guide sequence portion
  source 1..20: mol_type = other RNA
tgctggtggttgatgatcct

SEQ ID NO: 5606 - RNA, 20 nt, synthetic construct
  misc_feature 1..20: note = HBV-targeting guide sequence portion
  source 1..20: mol_type = other RNA
tgctgtacaaaaccttcgga

SEQ ID NO: 5607 - RNA, 20 nt, synthetic construct
  misc_feature 1..20: note = HBV-targeting guide sequence portion
  source 1..20: mol_type = other RNA
tgctgtacagacttggcccc

SEQ ID NO: 5608 - RNA, 20 nt, synthetic construct
  misc_feature 1..20: note = HBV-targeting guide sequence portion
  source 1..20: mol_type = other RNA
tgctgtagctcttgttccca

SEQ ID NO: 5609 - RNA, 20 nt, synthetic construct
  misc_feature 1..20: note = HBV-targeting guide sequence portion
  source 1..20: mol_type = other RNA
tgcttagattgaatacatgc

SEQ ID NO: 5610 - RNA, 20 nt, synthetic construct
  misc_feature 1..20: note = HBV-targeting guide sequence portion
  source 1..20: mol_type = other RNA
tgcttgatcttctaaattag

SEQ ID NO: 5611 - RNA, 20 nt, synthetic construct
  misc_feature 1..20: note = HBV-targeting guide sequence portion
  source 1..20: mol_type = other RNA
tgcttgcctgagtgcagtat

SEQ ID NO: 5612 - RNA, 20 nt, synthetic construct
  misc_feature 1..20: note = HBV-targeting guide sequence portion
  source 1..20: mol_type = other RNA
tgctttaatgcccttgtatg

SEQ ID NO: 5613 - RNA, 20 nt, synthetic construct
  misc_feature 1..20: note = HBV-targeting guide sequence portion
  source 1..20: mol_type = other RNA
tggaaaacaccctcttttcc

SEQ ID NO: 5614 - RNA, 20 nt, synthetic construct
  misc_feature 1..20: note = HBV-targeting guide sequence portion
  source 1..20: mol_type = other RNA
tggaaactgcacctgtattc

SEQ ID NO: 5615 - RNA, 20 nt, synthetic construct
  misc_feature 1..20: note = HBV-targeting guide sequence portion
  source 1..20: mol_type = other RNA
tggaaagattctgccccatg

SEQ ID NO: 5616 - RNA, 20 nt, synthetic construct
  misc_feature 1..20: note = HBV-targeting guide sequence portion
  source 1..20: mol_type = other RNA
tggaaagtgtgtcaacgaat

SEQ ID NO: 5617 - RNA, 20 nt, synthetic construct
  misc_feature 1..20: note = HBV-targeting guide sequence portion
  source 1..20: mol_type = other RNA
tggaacctttccggctcctc

SEQ ID NO: 5618 - RNA, 20 nt, synthetic construct
  misc_feature 1..20: note = HBV-targeting guide sequence portion
  source 1..20: mol_type = other RNA
tggaagagaaacggtcctag

SEQ ID NO: 5619 - RNA, 20 nt, synthetic construct
  misc_feature 1..20: note = HBV-targeting guide sequence portion
  source 1..20: mol_type = other RNA
tggaaggcgggtgttttata

SEQ ID NO: 5620 - RNA, 20 nt, synthetic construct
  misc_feature 1..20: note = HBV-targeting guide sequence portion
  source 1..20: mol_type = other RNA
tggaagtaatgattaactag

SEQ ID NO: 5621 - RNA, 20 nt, synthetic construct
  misc_feature 1..20: note = HBV-targeting guide sequence portion
  source 1..20: mol_type = other RNA
tggaattagaggacagacgg

SEQ ID NO: 5622 - RNA, 20 nt, synthetic construct
  misc_feature 1..20: note = HBV-targeting guide sequence portion
  source 1..20: mol_type = other RNA
tggacattgacccatataaa

SEQ ID NO: 5623 - RNA, 20 nt, synthetic construct
  misc_feature 1..20: note = HBV-targeting guide sequence portion
  source 1..20: mol_type = other RNA
tggacccagccttcagagca

SEQ ID NO: 5624 - RNA, 20 nt, synthetic construct
  misc_feature 1..20: note = HBV-targeting guide sequence portion
  source 1..20: mol_type = other RNA
tggactatcaaggtatgttt

SEQ ID NO: 5625 - RNA, 20 nt, synthetic construct
  misc_feature 1..20: note = HBV-targeting guide sequence portion
  source 1..20: mol_type = other RNA
tggactcataaggtgggaaa

SEQ ID NO: 5626 - RNA, 20 nt, synthetic construct
  misc_feature 1..20: note = HBV-targeting guide sequence portion
  source 1..20: mol_type = other RNA
tggactctctgcaatgtcaa

SEQ ID NO: 5627 - RNA, 20 nt, synthetic construct
  misc_feature 1..20: note = HBV-targeting guide sequence portion
  source 1..20: mol_type = other RNA
tggacttctctcaattttct

SEQ ID NO: 5628 - RNA, 20 nt, synthetic construct
  misc_feature 1..20: note = HBV-targeting guide sequence portion
  source 1..20: mol_type = other RNA
tggagaacatcacatcagga

SEQ ID NO: 5629 - RNA, 20 nt, synthetic construct
  misc_feature 1..20: note = HBV-targeting guide sequence portion
  source 1..20: mol_type = other RNA
tggagacagcggggtaggct

SEQ ID NO: 5630 - RNA, 20 nt, synthetic construct
  misc_feature 1..20: note = HBV-targeting guide sequence portion
  source 1..20: mol_type = other RNA
tggagaccaccgtgaacgcc

SEQ ID NO: 5631 - RNA, 20 nt, synthetic construct
  misc_feature 1..20: note = HBV-targeting guide sequence portion
  source 1..20: mol_type = other RNA
tggagcaaacattctcggga

SEQ ID NO: 5632 - RNA, 20 nt, synthetic construct
  misc_feature 1..20: note = HBV-targeting guide sequence portion
  source 1..20: mol_type = other RNA
tggagcattcgggctagggt

SEQ ID NO: 5633 - RNA, 20 nt, synthetic construct
  misc_feature 1..20: note = HBV-targeting guide sequence portion
  source 1..20: mol_type = other RNA
tggagccaccagcagggaga

SEQ ID NO: 5634 - RNA, 20 nt, synthetic construct
  misc_feature 1..20: note = HBV-targeting guide sequence portion
  source 1..20: mol_type = other RNA
tggagccctcaggctcaggg

SEQ ID NO: 5635 - RNA, 20 nt, synthetic construct
  misc_feature 1..20: note = HBV-targeting guide sequence portion
  source 1..20: mol_type = other RNA
tggagctactgtggagttac

SEQ ID NO: 5636 - RNA, 20 nt, synthetic construct
  misc_feature 1..20: note = HBV-targeting guide sequence portion
  source 1..20: mol_type = other RNA
tggaggacaggaggttggtg

SEQ ID NO: 5637 - RNA, 20 nt, synthetic construct
  misc_feature 1..20: note = HBV-targeting guide sequence portion
  source 1..20: mol_type = other RNA
tggaggagtgcgaatccaca

SEQ ID NO: 5638 - RNA, 20 nt, synthetic construct
  misc_feature 1..20: note = HBV-targeting guide sequence portion
  source 1..20: mol_type = other RNA
tggaggcttgaacagtagga

SEQ ID NO: 5639 - RNA, 20 nt, synthetic construct
  misc_feature 1..20: note = HBV-targeting guide sequence portion
  source 1..20: mol_type = other RNA
tggaggttggggactgcgaa

SEQ ID NO: 5640 - RNA, 20 nt, synthetic construct
  misc_feature 1..20: note = HBV-targeting guide sequence portion
  source 1..20: mol_type = other RNA
tggagtctcctgagcattgt

SEQ ID NO: 5641 - RNA, 20 nt, synthetic construct
  misc_feature 1..20: note = HBV-targeting guide sequence portion
  source 1..20: mol_type = other RNA
tggagtgtggattcgcactc

SEQ ID NO: 5642 - RNA, 20 nt, synthetic construct
  misc_feature 1..20: note = HBV-targeting guide sequence portion
  source 1..20: mol_type = other RNA
tggagttactctcgtttttg

SEQ ID NO: 5643 - RNA, 20 nt, synthetic construct
  misc_feature 1..20: note = HBV-targeting guide sequence portion
  source 1..20: mol_type = other RNA
tggagtttgctctgaaggct

SEQ ID NO: 5644 - RNA, 20 nt, synthetic construct
  misc_feature 1..20: note = HBV-targeting guide sequence portion
  source 1..20: mol_type = other RNA
tggataagggtattaaacct

SEQ ID NO: 5645 - RNA, 20 nt, synthetic construct
  misc_feature 1..20: note = HBV-targeting guide sequence portion
  source 1..20: mol_type = other RNA
tggataataaggtttaatac

SEQ ID NO: 5646 - RNA, 20 nt, synthetic construct
  misc_feature 1..20: note = HBV-targeting guide sequence portion
  source 1..20: mol_type = other RNA
tggatcctgcgcgggacgtc

SEQ ID NO: 5647 - RNA, 20 nt, synthetic construct
  misc_feature 1..20: note = HBV-targeting guide sequence portion
  source 1..20: mol_type = other RNA
tggatcggcagaggagccgg

SEQ ID NO: 5648 - RNA, 20 nt, synthetic construct
  misc_feature 1..20: note = HBV-targeting guide sequence portion
  source 1..20: mol_type = other RNA
tggatgatgtggtattgggg

SEQ ID NO: 5649 - RNA, 20 nt, synthetic construct
  misc_feature 1..20: note = HBV-targeting guide sequence portion
  source 1..20: mol_type = other RNA
tggatgtgtctgcggcgttt

SEQ ID NO: 5650 - RNA, 20 nt, synthetic construct
  misc_feature 1..20: note = HBV-targeting guide sequence portion
  source 1..20: mol_type = other RNA
tggattcgcactcctccagc

SEQ ID NO: 5651 - RNA, 20 nt, synthetic construct
  misc_feature 1..20: note = HBV-targeting guide sequence portion
  source 1..20: mol_type = other RNA
tggattgttggagtttgctc

SEQ ID NO: 5652 - RNA, 20 nt, synthetic construct
  misc_feature 1..20: note = HBV-targeting guide sequence portion
  source 1..20: mol_type = other RNA
tggcaacggggtaaaggttc

SEQ ID NO: 5653 - RNA, 20 nt, synthetic construct
  misc_feature 1..20: note = HBV-targeting guide sequence portion
  source 1..20: mol_type = other RNA
tggcaaggtttgcattatgc

SEQ ID NO: 5654 - RNA, 20 nt, synthetic construct
  misc_feature 1..20: note = HBV-targeting guide sequence portion
  source 1..20: mol_type = other RNA
tggcaatgatccccaacaat

SEQ ID NO: 5655 - RNA, 20 nt, synthetic construct
  misc_feature 1..20: note = HBV-targeting guide sequence portion
  source 1..20: mol_type = other RNA
tggcacagacctggccgttg

SEQ ID NO: 5656 - RNA, 20 nt, synthetic construct
  misc_feature 1..20: note = HBV-targeting guide sequence portion
  source 1..20: mol_type = other RNA
tggcactagtaaactgagcc

SEQ ID NO: 5657 - RNA, 20 nt, synthetic construct
  misc_feature 1..20: note = HBV-targeting guide sequence portion
  source 1..20: mol_type = other RNA
tggcagcacagcctagcagc

SEQ ID NO: 5658 - RNA, 20 nt, synthetic construct
  misc_feature 1..20: note = HBV-targeting guide sequence portion
  source 1..20: mol_type = other RNA
tggccaaaattcgcagtccc

SEQ ID NO: 5659 - RNA, 20 nt, synthetic construct
  misc_feature 1..20: note = HBV-targeting guide sequence portion
  source 1..20: mol_type = other RNA
tggccaagacacacggtagt

SEQ ID NO: 5660 - RNA, 20 nt, synthetic construct
  misc_feature 1..20: note = HBV-targeting guide sequence portion
  source 1..20: mol_type = other RNA
tggccagacgccaacaaggt

SEQ ID NO: 5661 - RNA, 20 nt, synthetic construct
  misc_feature 1..20: note = HBV-targeting guide sequence portion
  source 1..20: mol_type = other RNA
tggccagggatccttgttgg

SEQ ID NO: 5662 - RNA, 20 nt, synthetic construct
  misc_feature 1..20: note = HBV-targeting guide sequence portion
  source 1..20: mol_type = other RNA
tggcccccaataccacatca

SEQ ID NO: 5663 - RNA, 20 nt, synthetic construct
  misc_feature 1..20: note = HBV-targeting guide sequence portion
  source 1..20: mol_type = other RNA
tggccgttgcctggcaacgg

SEQ ID NO: 5664 - RNA, 20 nt, synthetic construct
  misc_feature 1..20: note = HBV-targeting guide sequence portion
  source 1..20: mol_type = other RNA
tggcctatgaccaagcccca

SEQ ID NO: 5665 - RNA, 20 nt, synthetic construct
  misc_feature 1..20: note = HBV-targeting guide sequence portion
  source 1..20: mol_type = other RNA
tggcctgaggatgagtgttt

SEQ ID NO: 5666 - RNA, 20 nt, synthetic construct
  misc_feature 1..20: note = HBV-targeting guide sequence portion
  source 1..20: mol_type = other RNA
tggcgaaaaagtgaaagcct

SEQ ID NO: 5667 - RNA, 20 nt, synthetic construct
  misc_feature 1..20: note = HBV-targeting guide sequence portion
  source 1..20: mol_type = other RNA
tggcgattggtagaggcagg

SEQ ID NO: 5668 - RNA, 20 nt, synthetic construct
  misc_feature 1..20: note = HBV-targeting guide sequence portion
  source 1..20: mol_type = other RNA
tggcgtctggccagggatcc

SEQ ID NO: 5669 - RNA, 20 nt, synthetic construct
  misc_feature 1..20: note = HBV-targeting guide sequence portion
  source 1..20: mol_type = other RNA
tggctcagtttactagtgcc

SEQ ID NO: 5670 - RNA, 20 nt, synthetic construct
  misc_feature 1..20: note = HBV-targeting guide sequence portion
  source 1..20: mol_type = other RNA
tggctccagttcaggaacag

SEQ ID NO: 5671 - RNA, 20 nt, synthetic construct
  misc_feature 1..20: note = HBV-targeting guide sequence portion
  source 1..20: mol_type = other RNA
tggctgctaggctgtgctgc

SEQ ID NO: 5672 - RNA, 20 nt, synthetic construct
  misc_feature 1..20: note = HBV-targeting guide sequence portion
  source 1..20: mol_type = other RNA
tggctttagggcatggacat

SEQ ID NO: 5673 - RNA, 20 nt, synthetic construct
  misc_feature 1..20: note = HBV-targeting guide sequence portion
  source 1..20: mol_type = other RNA
tggctttcagttatatggat

SEQ ID NO: 5674 - RNA, 20 nt, synthetic construct
  misc_feature 1..20: note = HBV-targeting guide sequence portion
  source 1..20: mol_type = other RNA
tgggaaattttacggggctt

SEQ ID NO: 5675 - RNA, 20 nt, synthetic construct
  misc_feature 1..20: note = HBV-targeting guide sequence portion
  source 1..20: mol_type = other RNA
tgggaacaagagctacagca

SEQ ID NO: 5676 - RNA, 20 nt, synthetic construct
  misc_feature 1..20: note = HBV-targeting guide sequence portion
  source 1..20: mol_type = other RNA
tgggaacgatgtatatttgc

SEQ ID NO: 5677 - RNA, 20 nt, synthetic construct
  misc_feature 1..20: note = HBV-targeting guide sequence portion
  source 1..20: mol_type = other RNA
tgggaatacaggtgcagttt

SEQ ID NO: 5678 - RNA, 20 nt, synthetic construct
  misc_feature 1..20: note = HBV-targeting guide sequence portion
  source 1..20: mol_type = other RNA
tgggacttcaatcccaacaa

SEQ ID NO: 5679 - RNA, 20 nt, synthetic construct
  misc_feature 1..20: note = HBV-targeting guide sequence portion
  source 1..20: mol_type = other RNA
tgggaggagttgggggagga

SEQ ID NO: 5680 - RNA, 20 nt, synthetic construct
  misc_feature 1..20: note = HBV-targeting guide sequence portion
  source 1..20: mol_type = other RNA
tgggagtgggcctcagcccg

SEQ ID NO: 5681 - RNA, 20 nt, synthetic construct
  misc_feature 1..20: note = HBV-targeting guide sequence portion
  source 1..20: mol_type = other RNA
tgggatcttgcagagtttgg

SEQ ID NO: 5682 - RNA, 20 nt, synthetic construct
  misc_feature 1..20: note = HBV-targeting guide sequence portion
  source 1..20: mol_type = other RNA
tgggatgggaatacaggtgc

SEQ ID NO: 5683 - RNA, 20 nt, synthetic construct
  misc_feature 1..20: note = HBV-targeting guide sequence portion
  source 1..20: mol_type = other RNA
tgggattctttcccgaccac

SEQ ID NO: 5684 - RNA, 20 nt, synthetic construct
  misc_feature 1..20: note = HBV-targeting guide sequence portion
  source 1..20: mol_type = other RNA
tgggattgaagtcccaatct

SEQ ID NO: 5685 - RNA, 20 nt, synthetic construct
  misc_feature 1..20: note = HBV-targeting guide sequence portion
  source 1..20: mol_type = other RNA
tgggcaagaattggtgggcg

SEQ ID NO: 5686 - RNA, 20 nt, synthetic construct
  misc_feature 1..20: note = HBV-targeting guide sequence portion
  source 1..20: mol_type = other RNA
tgggcctaaagttcagacaa

SEQ ID NO: 5687 - RNA, 20 nt, synthetic construct
  misc_feature 1..20: note = HBV-targeting guide sequence portion
  source 1..20: mol_type = other RNA
tgggcctcagcccgtttctc

SEQ ID NO: 5688 - RNA, 20 nt, synthetic construct
  misc_feature 1..20: note = HBV-targeting guide sequence portion
  source 1..20: mol_type = other RNA
tgggcgttcacggtggtctc

SEQ ID NO: 5689 - RNA, 20 nt, synthetic construct
  misc_feature 1..20: note = HBV-targeting guide sequence portion
  source 1..20: mol_type = other RNA
tgggctatgtcattgattgt

SEQ ID NO: 5690 - RNA, 20 nt, synthetic construct
  misc_feature 1..20: note = HBV-targeting guide sequence portion
  source 1..20: mol_type = other RNA
tgggctttcggaaaattcct

SEQ ID NO: 5691 - RNA, 20 nt, synthetic construct
  misc_feature 1..20: note = HBV-targeting guide sequence portion
  source 1..20: mol_type = other RNA
tggggaccctgcgctgaaca

SEQ ID NO: 5692 - RNA, 20 nt, synthetic construct
  misc_feature 1..20: note = HBV-targeting guide sequence portion
  source 1..20: mol_type = other RNA
tggggactgcgaattttggc

SEQ ID NO: 5693 - RNA, 20 nt, synthetic construct
  misc_feature 1..20: note = HBV-targeting guide sequence portion
  source 1..20: mol_type = other RNA
tggggagaactaatgactct

SEQ ID NO: 5694 - RNA, 20 nt, synthetic construct
  misc_feature 1..20: note = HBV-targeting guide sequence portion
  source 1..20: mol_type = other RNA
tggggatcattgccacaaaa

SEQ ID NO: 5695 - RNA, 20 nt, synthetic construct
  misc_feature 1..20: note = HBV-targeting guide sequence portion
  source 1..20: mol_type = other RNA
tggggcagaatctttccacc

SEQ ID NO: 5696 - RNA, 20 nt, synthetic construct
  misc_feature 1..20: note = HBV-targeting guide sequence portion
  source 1..20: mol_type = other RNA
tggggccctgtcgtcctctt

SEQ ID NO: 5697 - RNA, 20 nt, synthetic construct
  misc_feature 1..20: note = HBV-targeting guide sequence portion
  source 1..20: mol_type = other RNA
tggggcttggtcataggcca

SEQ ID NO: 5698 - RNA, 20 nt, synthetic construct
  misc_feature 1..20: note = HBV-targeting guide sequence portion
  source 1..20: mol_type = other RNA
tgggggaaagccctacgaac

SEQ ID NO: 5699 - RNA, 20 nt, synthetic construct
  misc_feature 1..20: note = HBV-targeting guide sequence portion
  source 1..20: mol_type = other RNA
tgggggaggagattagatta

SEQ ID NO: 5700 - RNA, 20 nt, synthetic construct
  misc_feature 1..20: note = HBV-targeting guide sequence portion
  source 1..20: mol_type = other RNA
tgggggccaagtctgtacag

SEQ ID NO: 5701 - RNA, 20 nt, synthetic construct
  misc_feature 1..20: note = HBV-targeting guide sequence portion
  source 1..20: mol_type = other RNA
tgggggttgcatcagcaaac

SEQ ID NO: 5702 - RNA, 20 nt, synthetic construct
  misc_feature 1..20: note = HBV-targeting guide sequence portion
  source 1..20: mol_type = other RNA
tggggtgaaccctagcccga

SEQ ID NO: 5703 - RNA, 20 nt, synthetic construct
  misc_feature 1..20: note = HBV-targeting guide sequence portion
  source 1..20: mol_type = other RNA
tggggtggagccctcaggct

SEQ ID NO: 5704 - RNA, 20 nt, synthetic construct
  misc_feature 1..20: note = HBV-targeting guide sequence portion
  source 1..20: mol_type = other RNA
tggggttattctcttaattt

SEQ ID NO: 5705 - RNA, 20 nt, synthetic construct
  misc_feature 1..20: note = HBV-targeting guide sequence portion
  source 1..20: mol_type = other RNA
tgggtactaatttagaagat

SEQ ID NO: 5706 - RNA, 20 nt, synthetic construct
  misc_feature 1..20: note = HBV-targeting guide sequence portion
  source 1..20: mol_type = other RNA
tgggtcaatgtccatgccct

SEQ ID NO: 5707 - RNA, 20 nt, synthetic construct
  misc_feature 1..20: note = HBV-targeting guide sequence portion
  source 1..20: mol_type = other RNA
tgggtcaccatattcttggg

SEQ ID NO: 5708 - RNA, 20 nt, synthetic construct
  misc_feature 1..20: note = HBV-targeting guide sequence portion
  source 1..20: mol_type = other RNA
tgggtccaactggtggtcgg

SEQ ID NO: 5709 - RNA, 20 nt, synthetic construct
  misc_feature 1..20: note = HBV-targeting guide sequence portion
  source 1..20: mol_type = other RNA
tgggtcgtccgcgggattca

SEQ ID NO: 5710 - RNA, 20 nt, synthetic construct
  misc_feature 1..20: note = HBV-targeting guide sequence portion
  source 1..20: mol_type = other RNA
tgggtcttctgggttttgct

SEQ ID NO: 5711 - RNA, 20 nt, synthetic construct
  misc_feature 1..20: note = HBV-targeting guide sequence portion
  source 1..20: mol_type = other RNA
tgggtggctttagggcatgg

SEQ ID NO: 5712 - RNA, 20 nt, synthetic construct
  misc_feature 1..20: note = HBV-targeting guide sequence portion
  source 1..20: mol_type = other RNA
tgggtgggtactaatttaga

SEQ ID NO: 5713 - RNA, 20 nt, synthetic construct
  misc_feature 1..20: note = HBV-targeting guide sequence portion
  source 1..20: mol_type = other RNA
tgggtgtacatttaaaccct

SEQ ID NO: 5714 - RNA, 20 nt, synthetic construct
  misc_feature 1..20: note = HBV-targeting guide sequence portion
  source 1..20: mol_type = other RNA
tgggttttgctgcccctttt

SEQ ID NO: 5715 - RNA, 20 nt, synthetic construct
  misc_feature 1..20: note = HBV-targeting guide sequence portion
  source 1..20: mol_type = other RNA
tggtaacagcggtataaagg

SEQ ID NO: 5716 - RNA, 20 nt, synthetic construct
  misc_feature 1..20: note = HBV-targeting guide sequence portion
  source 1..20: mol_type = other RNA
tggtagaggcaggaggcgga

SEQ ID NO: 5717 - RNA, 20 nt, synthetic construct
  misc_feature 1..20: note = HBV-targeting guide sequence portion
  source 1..20: mol_type = other RNA
tggtattgggggccaagtct

SEQ ID NO: 5718 - RNA, 20 nt, synthetic construct
  misc_feature 1..20: note = HBV-targeting guide sequence portion
  source 1..20: mol_type = other RNA
tggtcataggccatcagcgc

SEQ ID NO: 5719 - RNA, 20 nt, synthetic construct
  misc_feature 1..20: note = HBV-targeting guide sequence portion
  source 1..20: mol_type = other RNA
tggtcgggaaagaatcccag

SEQ ID NO: 5720 - RNA, 20 nt, synthetic construct
  misc_feature 1..20: note = HBV-targeting guide sequence portion
  source 1..20: mol_type = other RNA
tggtcggtcggaacggcagg

SEQ ID NO: 5721 - RNA, 20 nt, synthetic construct
  misc_feature 1..20: note = HBV-targeting guide sequence portion
  source 1..20: mol_type = other RNA
tggtctataagctggaggag

SEQ ID NO: 5722 - RNA, 20 nt, synthetic construct
  misc_feature 1..20: note = HBV-targeting guide sequence portion
  source 1..20: mol_type = other RNA
tggtctccatgcgacgtgca

SEQ ID NO: 5723 - RNA, 20 nt, synthetic construct
  misc_feature 1..20: note = HBV-targeting guide sequence portion
  source 1..20: mol_type = other RNA
tggtctgcgcaccagcacca

SEQ ID NO: 5724 - RNA, 20 nt, synthetic construct
  misc_feature 1..20: note = HBV-targeting guide sequence portion
  source 1..20: mol_type = other RNA
tggtgaatttaggataaaac

SEQ ID NO: 5725 - RNA, 20 nt, synthetic construct
  misc_feature 1..20: note = HBV-targeting guide sequence portion
  source 1..20: mol_type = other RNA
tggtgacccacagaatgagg

SEQ ID NO: 5726 - RNA, 20 nt, synthetic construct
  misc_feature 1..20: note = HBV-targeting guide sequence portion
  source 1..20: mol_type = other RNA
tggtgaggtgaacaatgctc

SEQ ID NO: 5727 - RNA, 20 nt, synthetic construct
  misc_feature 1..20: note = HBV-targeting guide sequence portion
  source 1..20: mol_type = other RNA
tggtgagtgattggaggttg

SEQ ID NO: 5728 - RNA, 20 nt, synthetic construct
  misc_feature 1..20: note = HBV-targeting guide sequence portion
  source 1..20: mol_type = other RNA
tggtgcgcagaccaatttat

SEQ ID NO: 5729 - RNA, 20 nt, synthetic construct
  misc_feature 1..20: note = HBV-targeting guide sequence portion
  source 1..20: mol_type = other RNA
tggtgctggtgcgcagacca

SEQ ID NO: 5730 - RNA, 20 nt, synthetic construct
  misc_feature 1..20: note = HBV-targeting guide sequence portion
  source 1..20: mol_type = other RNA
tggtggaaagattctgcccc

SEQ ID NO: 5731 - RNA, 20 nt, synthetic construct
  misc_feature 1..20: note = HBV-targeting guide sequence portion
  source 1..20: mol_type = other RNA
tggtggacttctctcaattt

SEQ ID NO: 5732 - RNA, 20 nt, synthetic construct
  misc_feature 1..20: note = HBV-targeting guide sequence portion
  source 1..20: mol_type = other RNA
tggtggctccagttcaggaa

SEQ ID NO: 5733 - RNA, 20 nt, synthetic construct
  misc_feature 1..20: note = HBV-targeting guide sequence portion
  source 1..20: mol_type = other RNA
tggtgggcgttcacggtggt

SEQ ID NO: 5734 - RNA, 20 nt, synthetic construct
  misc_feature 1..20: note = HBV-targeting guide sequence portion
  source 1..20: mol_type = other RNA
tggtggtcgggaaagaatcc

SEQ ID NO: 5735 - RNA, 20 nt, synthetic construct
  misc_feature 1..20: note = HBV-targeting guide sequence portion
  source 1..20: mol_type = other RNA
tggtggtctataagctggag

SEQ ID NO: 5736 - RNA, 20 nt, synthetic construct
  misc_feature 1..20: note = HBV-targeting guide sequence portion
  source 1..20: mol_type = other RNA
tggtggttgatgatcctgga

SEQ ID NO: 5737 - RNA, 20 nt, synthetic construct
  misc_feature 1..20: note = HBV-targeting guide sequence portion
  source 1..20: mol_type = other RNA
tggtgtagatgtatattagg

SEQ ID NO: 5738 - RNA, 20 nt, synthetic construct
  misc_feature 1..20: note = HBV-targeting guide sequence portion
  source 1..20: mol_type = other RNA
tggtgtcttttggagtgtgg

SEQ ID NO: 5739 - RNA, 20 nt, synthetic construct
  misc_feature 1..20: note = HBV-targeting guide sequence portion
  source 1..20: mol_type = other RNA
tggttatcctgctttaatgc

SEQ ID NO: 5740 - RNA, 20 nt, synthetic construct
  misc_feature 1..20: note = HBV-targeting guide sequence portion
  source 1..20: mol_type = other RNA
tggttatcgctggatgtgtc

SEQ ID NO: 5741 - RNA, 20 nt, synthetic construct
  misc_feature 1..20: note = HBV-targeting guide sequence portion
  source 1..20: mol_type = other RNA
tggttcgtagggctttcccc

SEQ ID NO: 5742 - RNA, 20 nt, synthetic construct
  misc_feature 1..20: note = HBV-targeting guide sequence portion
  source 1..20: mol_type = other RNA
tggttcttctggactatcaa

SEQ ID NO: 5743 - RNA, 20 nt, synthetic construct
  misc_feature 1..20: note = HBV-targeting guide sequence portion
  source 1..20: mol_type = other RNA
tggttgatgatcctggaatt

SEQ ID NO: 5744 - RNA, 20 nt, synthetic construct
  misc_feature 1..20: note = HBV-targeting guide sequence portion
  source 1..20: mol_type = other RNA
tggttggggcttggtcatag

SEQ ID NO: 5745 - RNA, 20 nt, synthetic construct
  misc_feature 1..20: note = HBV-targeting guide sequence portion
  source 1..20: mol_type = other RNA
tggtttcacatttcttgtct

SEQ ID NO: 5746 - RNA, 20 nt, synthetic construct
  misc_feature 1..20: note = HBV-targeting guide sequence portion
  source 1..20: mol_type = other RNA
tgtaaaaggggcagcaaaac

SEQ ID NO: 5747 - RNA, 20 nt, synthetic construct
  misc_feature 1..20: note = HBV-targeting guide sequence portion
  source 1..20: mol_type = other RNA
tgtaaacaatacctgaacct

SEQ ID NO: 5748 - RNA, 20 nt, synthetic construct
  misc_feature 1..20: note = HBV-targeting guide sequence portion
  source 1..20: mol_type = other RNA
tgtaaatagtgtctagtttg

SEQ ID NO: 5749 - RNA, 20 nt, synthetic construct
  misc_feature 1..20: note = HBV-targeting guide sequence portion
  source 1..20: mol_type = other RNA
tgtaacacgagcaggggtcc

SEQ ID NO: 5750 - RNA, 20 nt, synthetic construct
  misc_feature 1..20: note = HBV-targeting guide sequence portion
  source 1..20: mol_type = other RNA
tgtaagaccttgggcaagaa

SEQ ID NO: 5751 - RNA, 20 nt, synthetic construct
  misc_feature 1..20: note = HBV-targeting guide sequence portion
  source 1..20: mol_type = other RNA
tgtaagcgggcctacaaact

SEQ ID NO: 5752 - RNA, 20 nt, synthetic construct
  misc_feature 1..20: note = HBV-targeting guide sequence portion
  source 1..20: mol_type = other RNA
tgtaagttggcgaaaaagtg

SEQ ID NO: 5753 - RNA, 20 nt, synthetic construct
  misc_feature 1..20: note = HBV-targeting guide sequence portion
  source 1..20: mol_type = other RNA
tgtacaaaaccttcggatgg

SEQ ID NO: 5754 - RNA, 20 nt, synthetic construct
  misc_feature 1..20: note = HBV-targeting guide sequence portion
  source 1..20: mol_type = other RNA
tgtacacccaaagacaaaag

SEQ ID NO: 5755 - RNA, 20 nt, synthetic construct
  misc_feature 1..20: note = HBV-targeting guide sequence portion
  source 1..20: mol_type = other RNA
tgtacagacttggcccccaa

SEQ ID NO: 5756 - RNA, 20 nt, synthetic construct
  misc_feature 1..20: note = HBV-targeting guide sequence portion
  source 1..20: mol_type = other RNA
tgtacagcaacaggagggat

SEQ ID NO: 5757 - RNA, 20 nt, synthetic construct
  misc_feature 1..20: note = HBV-targeting guide sequence portion
  source 1..20: mol_type = other RNA
tgtacagcatcttgagtccc

SEQ ID NO: 5758 - RNA, 20 nt, synthetic construct
  misc_feature 1..20: note = HBV-targeting guide sequence portion
  source 1..20: mol_type = other RNA
tgtacatttaaaccctaaca

SEQ ID NO: 5759 - RNA, 20 nt, synthetic construct
  misc_feature 1..20: note = HBV-targeting guide sequence portion
  source 1..20: mol_type = other RNA
tgtacctgtctttaaccctc

SEQ ID NO: 5760 - RNA, 20 nt, synthetic construct
  misc_feature 1..20: note = HBV-targeting guide sequence portion
  source 1..20: mol_type = other RNA
tgtactaggaggctgtaggc

SEQ ID NO: 5761 - RNA, 20 nt, synthetic construct
  misc_feature 1..20: note = HBV-targeting guide sequence portion
  source 1..20: mol_type = other RNA
tgtagatgtatattaggaaa

SEQ ID NO: 5762 - RNA, 20 nt, synthetic construct
  misc_feature 1..20: note = HBV-targeting guide sequence portion
  source 1..20: mol_type = other RNA
tgtagctcttgttcccaaga

SEQ ID NO: 5763 - RNA, 20 nt, synthetic construct
  misc_feature 1..20: note = HBV-targeting guide sequence portion
  source 1..20: mol_type = other RNA
tgtaggcataaattggtctg

SEQ ID NO: 5764 - RNA, 20 nt, synthetic construct
  misc_feature 1..20: note = HBV-targeting guide sequence portion
  source 1..20: mol_type = other RNA
tgtaggcccgcttacagtta

SEQ ID NO: 5765 - RNA, 20 nt, synthetic construct
  misc_feature 1..20: note = HBV-targeting guide sequence portion
  source 1..20: mol_type = other RNA
tgtatattaggaaaagaggg

SEQ ID NO: 5766 - RNA, 20 nt, synthetic construct
  misc_feature 1..20: note = HBV-targeting guide sequence portion
  source 1..20: mol_type = other RNA
tgtatatttgcgggagagga

SEQ ID NO: 5767 - RNA, 20 nt, synthetic construct
  misc_feature 1..20: note = HBV-targeting guide sequence portion
  source 1..20: mol_type = other RNA
tgtatccctcctgttgctgt

SEQ ID NO: 5768 - RNA, 20 nt, synthetic construct
  misc_feature 1..20: note = HBV-targeting guide sequence portion
  source 1..20: mol_type = other RNA
tgtatcgggatgccttggag

SEQ ID NO: 5769 - RNA, 20 nt, synthetic construct
  misc_feature 1..20: note = HBV-targeting guide sequence portion
  source 1..20: mol_type = other RNA
tgtatctccctgctggtggc

SEQ ID NO: 5770 - RNA, 20 nt, synthetic construct
  misc_feature 1..20: note = HBV-targeting guide sequence portion
  source 1..20: mol_type = other RNA
tgtatgatgtgattttgtgg

SEQ ID NO: 5771 - RNA, 20 nt, synthetic construct
  misc_feature 1..20: note = HBV-targeting guide sequence portion
  source 1..20: mol_type = other RNA
tgtatgcatgtattcaatct

SEQ ID NO: 5772 - RNA, 20 nt, synthetic construct
  misc_feature 1..20: note = HBV-targeting guide sequence portion
  source 1..20: mol_type = other RNA
tgtattcaatctaagcaggc

SEQ ID NO: 5773 - RNA, 20 nt, synthetic construct
  misc_feature 1..20: note = HBV-targeting guide sequence portion
  source 1..20: mol_type = other RNA
tgtattcccatcccatcatc

SEQ ID NO: 5774 - RNA, 20 nt, synthetic construct
  misc_feature 1..20: note = HBV-targeting guide sequence portion
  source 1..20: mol_type = other RNA
tgtcaacaaggaaaaccccg

SEQ ID NO: 5775 - RNA, 20 nt, synthetic construct
  misc_feature 1..20: note = HBV-targeting guide sequence portion
  source 1..20: mol_type = other RNA
tgtcaacacatagcgcctca

SEQ ID NO: 5776 - RNA, 20 nt, synthetic construct
  misc_feature 1..20: note = HBV-targeting guide sequence portion
  source 1..20: mol_type = other RNA
tgtcaacactcatatgggcc

SEQ ID NO: 5777 - RNA, 20 nt, synthetic construct
  misc_feature 1..20: note = HBV-targeting guide sequence portion
  source 1..20: mol_type = other RNA
tgtcaacgaattgtgggtct

SEQ ID NO: 5778 - RNA, 20 nt, synthetic construct
  misc_feature 1..20: note = HBV-targeting guide sequence portion
  source 1..20: mol_type = other RNA
tgtcaacgaccgaccttgag

SEQ ID NO: 5779 - RNA, 20 nt, synthetic construct
  misc_feature 1..20: note = HBV-targeting guide sequence portion
  source 1..20: mol_type = other RNA
tgtcagtcccgagaatgttt

SEQ ID NO: 5780 - RNA, 20 nt, synthetic construct
  misc_feature 1..20: note = HBV-targeting guide sequence portion
  source 1..20: mol_type = other RNA
tgtcattgattgttggggat

SEQ ID NO: 5781 - RNA, 20 nt, synthetic construct
  misc_feature 1..20: note = HBV-targeting guide sequence portion
  source 1..20: mol_type = other RNA
tgtccatgccctaaagccac

SEQ ID NO: 5782 - RNA, 20 nt, synthetic construct
  misc_feature 1..20: note = HBV-targeting guide sequence portion
  source 1..20: mol_type = other RNA
tgtcctactgttcaagcctc

SEQ ID NO: 5783 - RNA, 20 nt, synthetic construct
  misc_feature 1..20: note = HBV-targeting guide sequence portion
  source 1..20: mol_type = other RNA
tgtcctccaacttgtcctgg

SEQ ID NO: 5784 - RNA, 20 nt, synthetic construct
  misc_feature 1..20: note = HBV-targeting guide sequence portion
  source 1..20: mol_type = other RNA
tgtcctctaattccaggatc

SEQ ID NO: 5785 - RNA, 20 nt, synthetic construct
  misc_feature 1..20: note = HBV-targeting guide sequence portion
  source 1..20: mol_type = other RNA
tgtcctctcccgcaaatata

SEQ ID NO: 5786 - RNA, 20 nt, synthetic construct
  misc_feature 1..20: note = HBV-targeting guide sequence portion
  source 1..20: mol_type = other RNA
tgtcctggttatcgctggat

SEQ ID NO: 5787 - RNA, 20 nt, synthetic construct
  misc_feature 1..20: note = HBV-targeting guide sequence portion
  source 1..20: mol_type = other RNA
tgtcgtcctcttctctgcct

SEQ ID NO: 5788 - RNA, 20 nt, synthetic construct
  misc_feature 1..20: note = HBV-targeting guide sequence portion
  source 1..20: mol_type = other RNA
tgtctagtttggaagtaatg

SEQ ID NO: 5789 - RNA, 20 nt, synthetic construct
  misc_feature 1..20: note = HBV-targeting guide sequence portion
  source 1..20: mol_type = other RNA
tgtctccacctctgagaaac

SEQ ID NO: 5790 - RNA, 20 nt, synthetic construct
  misc_feature 1..20: note = HBV-targeting guide sequence portion
  source 1..20: mol_type = other RNA
tgtctgaactttaggcccat

SEQ ID NO: 5791 - RNA, 20 nt, synthetic construct
  misc_feature 1..20: note = HBV-targeting guide sequence portion
  source 1..20: mol_type = other RNA
tgtctgcggcgttttatcat

SEQ ID NO: 5792 - RNA, 20 nt, synthetic construct
  misc_feature 1..20: note = HBV-targeting guide sequence portion
  source 1..20: mol_type = other RNA
tgtcttacttttggaagaga

SEQ ID NO: 5793 - RNA, 20 nt, synthetic construct
  misc_feature 1..20: note = HBV-targeting guide sequence portion
  source 1..20: mol_type = other RNA
tgtcttggccaaaattcgca

SEQ ID NO: 5794 - RNA, 20 nt, synthetic construct
  misc_feature 1..20: note = HBV-targeting guide sequence portion
  source 1..20: mol_type = other RNA
tgtctttaaccctcattgga

SEQ ID NO: 5795 - RNA, 20 nt, synthetic construct
  misc_feature 1..20: note = HBV-targeting guide sequence portion
  source 1..20: mol_type = other RNA
tgtctttgggtgtacattta

SEQ ID NO: 5796 - RNA, 20 nt, synthetic construct
  misc_feature 1..20: note = HBV-targeting guide sequence portion
  source 1..20: mol_type = other RNA
tgtcttttggagtgtggatt

SEQ ID NO: 5797 - RNA, 20 nt, synthetic construct
  misc_feature 1..20: note = HBV-targeting guide sequence portion
  source 1..20: mol_type = other RNA
tgtgaaaccacaatagttgt

SEQ ID NO: 5798 - RNA, 20 nt, synthetic construct
  misc_feature 1..20: note = HBV-targeting guide sequence portion
  source 1..20: mol_type = other RNA
tgtgaacagtttgtaggccc

SEQ ID NO: 5799 - RNA, 20 nt, synthetic construct
  misc_feature 1..20: note = HBV-targeting guide sequence portion
  source 1..20: mol_type = other RNA
tgtgagaggcagtagtcgga

SEQ ID NO: 5800 - RNA, 20 nt, synthetic construct
  misc_feature 1..20: note = HBV-targeting guide sequence portion
  source 1..20: mol_type = other RNA
tgtgaggattcttgtcaaca

SEQ ID NO: 5801 - RNA, 20 nt, synthetic construct
  misc_feature 1..20: note = HBV-targeting guide sequence portion
  source 1..20: mol_type = other RNA
tgtgatgttctccatgttca

SEQ ID NO: 5802 - RNA, 20 nt, synthetic construct
  misc_feature 1..20: note = HBV-targeting guide sequence portion
  source 1..20: mol_type = other RNA
tgtgattttgtggcaatgat

SEQ ID NO: 5803 - RNA, 20 nt, synthetic construct
  misc_feature 1..20: note = HBV-targeting guide sequence portion
  source 1..20: mol_type = other RNA
tgtgcacttcgcttcacctc

SEQ ID NO: 5804 - RNA, 20 nt, synthetic construct
  misc_feature 1..20: note = HBV-targeting guide sequence portion
  source 1..20: mol_type = other RNA
tgtgccaagtgtttgctgat

SEQ ID NO: 5805 - RNA, 20 nt, synthetic construct
  misc_feature 1..20: note = HBV-targeting guide sequence portion
  source 1..20: mol_type = other RNA
tgtgccttctcatctgccgg

SEQ ID NO: 5806 - RNA, 20 nt, synthetic construct
  misc_feature 1..20: note = HBV-targeting guide sequence portion
  source 1..20: mol_type = other RNA
tgtgccttgggtggctttag

SEQ ID NO: 5807 - RNA, 20 nt, synthetic construct
  misc_feature 1..20: note = HBV-targeting guide sequence portion
  source 1..20: mol_type = other RNA
tgtgctgccaactggatcct

SEQ ID NO: 5808 - RNA, 20 nt, synthetic construct
  misc_feature 1..20: note = HBV-targeting guide sequence portion
  source 1..20: mol_type = other RNA
tgtggagttactctcgtttt

SEQ ID NO: 5809 - RNA, 20 nt, synthetic construct
  misc_feature 1..20: note = HBV-targeting guide sequence portion
  source 1..20: mol_type = other RNA
tgtggattcgcactcctcca

SEQ ID NO: 5810 - RNA, 20 nt, synthetic construct
  misc_feature 1..20: note = HBV-targeting guide sequence portion
  source 1..20: mol_type = other RNA
tgtggcaatgatccccaaca

SEQ ID NO: 5811 - RNA, 20 nt, synthetic construct
  misc_feature 1..20: note = HBV-targeting guide sequence portion
  source 1..20: mol_type = other RNA
tgtgggtcaccatattcttg

SEQ ID NO: 5812 - RNA, 20 nt, synthetic construct
  misc_feature 1..20: note = HBV-targeting guide sequence portion
  source 1..20: mol_type = other RNA
tgtgggtcttctgggttttg

SEQ ID NO: 5813 - RNA, 20 nt, synthetic construct
  misc_feature 1..20: note = HBV-targeting guide sequence portion
  source 1..20: mol_type = other RNA
tgtggtattgggggccaagt

SEQ ID NO: 5814 - RNA, 20 nt, synthetic construct
  misc_feature 1..20: note = HBV-targeting guide sequence portion
  source 1..20: mol_type = other RNA
tgtggttatcctgctttaat

SEQ ID NO: 5815 - RNA, 20 nt, synthetic construct
  misc_feature 1..20: note = HBV-targeting guide sequence portion
  source 1..20: mol_type = other RNA
tgtggtttcacatttcttgt

SEQ ID NO: 5816 - RNA, 20 nt, synthetic construct
  misc_feature 1..20: note = HBV-targeting guide sequence portion
  source 1..20: mol_type = other RNA
tgtgtaaaaggggcagcaaa

SEQ ID NO: 5817 - RNA, 20 nt, synthetic construct
  misc_feature 1..20: note = HBV-targeting guide sequence portion
  source 1..20: mol_type = other RNA
tgtgtaaacaatacctgaac

SEQ ID NO: 5818 - RNA, 20 nt, synthetic construct
  misc_feature 1..20: note = HBV-targeting guide sequence portion
  source 1..20: mol_type = other RNA
tgtgtaaatagtgtctagtt

SEQ ID NO: 5819 - RNA, 20 nt, synthetic construct
  misc_feature 1..20: note = HBV-targeting guide sequence portion
  source 1..20: mol_type = other RNA
tgtgtatgatgtgattttgt

SEQ ID NO: 5820 - RNA, 20 nt, synthetic construct
  misc_feature 1..20: note = HBV-targeting guide sequence portion
  source 1..20: mol_type = other RNA
tgtgtcaacgaattgtgggt

SEQ ID NO: 5821 - RNA, 20 nt, synthetic construct
  misc_feature 1..20: note = HBV-targeting guide sequence portion
  source 1..20: mol_type = other RNA
tgtgtctgcggcgttttatc

SEQ ID NO: 5822 - RNA, 20 nt, synthetic construct
  misc_feature 1..20: note = HBV-targeting guide sequence portion
  source 1..20: mol_type = other RNA
tgtgtcttggccaaaattcg

SEQ ID NO: 5823 - RNA, 20 nt, synthetic construct
  misc_feature 1..20: note = HBV-targeting guide sequence portion
  source 1..20: mol_type = other RNA
tgtgttgacactctcttata

SEQ ID NO: 5824 - RNA, 20 nt, synthetic construct
  misc_feature 1..20: note = HBV-targeting guide sequence portion
  source 1..20: mol_type = other RNA
tgtgttgttagacgacgagg

SEQ ID NO: 5825 - RNA, 20 nt, synthetic construct
  misc_feature 1..20: note = HBV-targeting guide sequence portion
  source 1..20: mol_type = other RNA
tgttaaccgggagttttctg

SEQ ID NO: 5826 - RNA, 20 nt, synthetic construct
  misc_feature 1..20: note = HBV-targeting guide sequence portion
  source 1..20: mol_type = other RNA
tgttacaggcggggttttcc

SEQ ID NO: 5827 - RNA, 20 nt, synthetic construct
  misc_feature 1..20: note = HBV-targeting guide sequence portion
  source 1..20: mol_type = other RNA
tgttaccaattttcttttgt

SEQ ID NO: 5828 - RNA, 20 nt, synthetic construct
  misc_feature 1..20: note = HBV-targeting guide sequence portion
  source 1..20: mol_type = other RNA
tgttagacgacgaggcaggt

SEQ ID NO: 5829 - RNA, 20 nt, synthetic construct
  misc_feature 1..20: note = HBV-targeting guide sequence portion
  source 1..20: mol_type = other RNA
tgttagggtttaaatgtaca

SEQ ID NO: 5830 - RNA, 20 nt, synthetic construct
  misc_feature 1..20: note = HBV-targeting guide sequence portion
  source 1..20: mol_type = other RNA
tgttagtatcccttggactc

SEQ ID NO: 5831 - RNA, 20 nt, synthetic construct
  misc_feature 1..20: note = HBV-targeting guide sequence portion
  source 1..20: mol_type = other RNA
tgttcaagcctccaagctgt

SEQ ID NO: 5832 - RNA, 20 nt, synthetic construct
  misc_feature 1..20: note = HBV-targeting guide sequence portion
  source 1..20: mol_type = other RNA
tgttcacattttttgataat

SEQ ID NO: 5833 - RNA, 20 nt, synthetic construct
  misc_feature 1..20: note = HBV-targeting guide sequence portion
  source 1..20: mol_type = other RNA
tgttcacctcaccatactgc

SEQ ID NO: 5834 - RNA, 20 nt, synthetic construct
  misc_feature 1..20: note = HBV-targeting guide sequence portion
  source 1..20: mol_type = other RNA
tgttcagcgcagggtcccca

SEQ ID NO: 5835 - RNA, 20 nt, synthetic construct
  misc_feature 1..20: note = HBV-targeting guide sequence portion
  source 1..20: mol_type = other RNA
tgttcagtggttcgtagggc

SEQ ID NO: 5836 - RNA, 20 nt, synthetic construct
  misc_feature 1..20: note = HBV-targeting guide sequence portion
  source 1..20: mol_type = other RNA
tgttcatgtcctactgttca

SEQ ID NO: 5837 - RNA, 20 nt, synthetic construct
  misc_feature 1..20: note = HBV-targeting guide sequence portion
  source 1..20: mol_type = other RNA
tgttcccaagaatatggtga

SEQ ID NO: 5838 - RNA, 20 nt, synthetic construct
  misc_feature 1..20: note = HBV-targeting guide sequence portion
  source 1..20: mol_type = other RNA
tgttccgactactgcctctc

SEQ ID NO: 5839 - RNA, 20 nt, synthetic construct
  misc_feature 1..20: note = HBV-targeting guide sequence portion
  source 1..20: mol_type = other RNA
tgttcctgaactggagccac

SEQ ID NO: 5840 - RNA, 20 nt, synthetic construct
  misc_feature 1..20: note = HBV-targeting guide sequence portion
  source 1..20: mol_type = other RNA
tgttctccatgttcagcgca

SEQ ID NO: 5841 - RNA, 20 nt, synthetic construct
  misc_feature 1..20: note = HBV-targeting guide sequence portion
  source 1..20: mol_type = other RNA
tgttctggataataaggttt

SEQ ID NO: 5842 - RNA, 20 nt, synthetic construct
  misc_feature 1..20: note = HBV-targeting guide sequence portion
  source 1..20: mol_type = other RNA
tgttgacaagaatcctcaca

SEQ ID NO: 5843 - RNA, 20 nt, synthetic construct
  misc_feature 1..20: note = HBV-targeting guide sequence portion
  source 1..20: mol_type = other RNA
tgttgacactctcttatata

SEQ ID NO: 5844 - RNA, 20 nt, synthetic construct
  misc_feature 1..20: note = HBV-targeting guide sequence portion
  source 1..20: mol_type = other RNA
tgttgacataactgactact

SEQ ID NO: 5845 - RNA, 20 nt, synthetic construct
  misc_feature 1..20: note = HBV-targeting guide sequence portion
  source 1..20: mol_type = other RNA
tgttgataggataggggcat

SEQ ID NO: 5846 - RNA, 20 nt, synthetic construct
  misc_feature 1..20: note = HBV-targeting guide sequence portion
  source 1..20: mol_type = other RNA
tgttgctgtacaaaaccttc

SEQ ID NO: 5847 - RNA, 20 nt, synthetic construct
  misc_feature 1..20: note = HBV-targeting guide sequence portion
  source 1..20: mol_type = other RNA
tgttggagtttgctctgaag

SEQ ID NO: 5848 - RNA, 20 nt, synthetic construct
  misc_feature 1..20: note = HBV-targeting guide sequence portion
  source 1..20: mol_type = other RNA
tgttggcgtctggccaggga

SEQ ID NO: 5849 - RNA, 20 nt, synthetic construct
  misc_feature 1..20: note = HBV-targeting guide sequence portion
  source 1..20: mol_type = other RNA
tgttgggattgaagtcccaa

SEQ ID NO: 5850 - RNA, 20 nt, synthetic construct
  misc_feature 1..20: note = HBV-targeting guide sequence portion
  source 1..20: mol_type = other RNA
tgttggggatcattgccaca

SEQ ID NO: 5851 - RNA, 20 nt, synthetic construct
  misc_feature 1..20: note = HBV-targeting guide sequence portion
  source 1..20: mol_type = other RNA
tgttggttcttctggactat

SEQ ID NO: 5852 - RNA, 20 nt, synthetic construct
  misc_feature 1..20: note = HBV-targeting guide sequence portion
  source 1..20: mol_type = other RNA
tgttgtcctctcccgcaaat

SEQ ID NO: 5853 - RNA, 20 nt, synthetic construct
  misc_feature 1..20: note = HBV-targeting guide sequence portion
  source 1..20: mol_type = other RNA
tgttgttagacgacgaggca

SEQ ID NO: 5854 - RNA, 20 nt, synthetic construct
  misc_feature 1..20: note = HBV-targeting guide sequence portion
  source 1..20: mol_type = other RNA
tgtttaaagactgggaggag

SEQ ID NO: 5855 - RNA, 20 nt, synthetic construct
  misc_feature 1..20: note = HBV-targeting guide sequence portion
  source 1..20: mol_type = other RNA
tgtttacacagaaaggcctt

SEQ ID NO: 5856 - RNA, 20 nt, synthetic construct
  misc_feature 1..20: note = HBV-targeting guide sequence portion
  source 1..20: mol_type = other RNA
tgtttacgtcccgtcggcgc

SEQ ID NO: 5857 - RNA, 20 nt, synthetic construct
  misc_feature 1..20: note = HBV-targeting guide sequence portion
  source 1..20: mol_type = other RNA
tgtttcagaaaactcccggt

SEQ ID NO: 5858 - RNA, 20 nt, synthetic construct
  misc_feature 1..20: note = HBV-targeting guide sequence portion
  source 1..20: mol_type = other RNA
tgtttcccgtctgtcctcta

SEQ ID NO: 5859 - RNA, 20 nt, synthetic construct
  misc_feature 1..20: note = HBV-targeting guide sequence portion
  source 1..20: mol_type = other RNA
tgtttctcagaggtggagac

SEQ ID NO: 5860 - RNA, 20 nt, synthetic construct
  misc_feature 1..20: note = HBV-targeting guide sequence portion
  source 1..20: mol_type = other RNA
tgtttgctccagaccggctg

SEQ ID NO: 5861 - RNA, 20 nt, synthetic construct
  misc_feature 1..20: note = HBV-targeting guide sequence portion
  source 1..20: mol_type = other RNA
tgtttgctgatgcaaccccc

SEQ ID NO: 5862 - RNA, 20 nt, synthetic construct
  misc_feature 1..20: note = HBV-targeting guide sequence portion
  source 1..20: mol_type = other RNA
tgtttggctttcagttatat

SEQ ID NO: 5863 - RNA, 20 nt, synthetic construct
  misc_feature 1..20: note = HBV-targeting guide sequence portion
  source 1..20: mol_type = other RNA
tgtttgtttaaagactggga

SEQ ID NO: 5864 - RNA, 20 nt, synthetic construct
  misc_feature 1..20: note = HBV-targeting guide sequence portion
  source 1..20: mol_type = other RNA
tgttttatataagagagtgt

SEQ ID NO: 5865 - RNA, 20 nt, synthetic construct
  misc_feature 1..20: note = HBV-targeting guide sequence portion
  source 1..20: mol_type = other RNA
tgttttccaatgagggttaa

SEQ ID NO: 5866 - RNA, 20 nt, synthetic construct
  misc_feature 1..20: note = HBV-targeting guide sequence portion
  source 1..20: mol_type = other RNA
tgttttgctcgcagccggtc

SEQ ID NO: 5867 - RNA, 20 nt, synthetic construct
  misc_feature 1..20: note = HBV-targeting guide sequence portion
  source 1..20: mol_type = other RNA
tgttttgttagggtttaaat

SEQ ID NO: 5868 - RNA, 20 nt, synthetic construct
  misc_feature 1..20: note = HBV-targeting guide sequence portion
  source 1..20: mol_type = other RNA
ttaaacaaacagtctttgaa

SEQ ID NO: 5869 - RNA, 20 nt, synthetic construct
  misc_feature 1..20: note = HBV-targeting guide sequence portion
  source 1..20: mol_type = other RNA
ttaaaccctaacaaaacaaa

SEQ ID NO: 5870 - RNA, 20 nt, synthetic construct
  misc_feature 1..20: note = HBV-targeting guide sequence portion
  source 1..20: mol_type = other RNA
ttaaaccttattatccagaa

SEQ ID NO: 5871 - RNA, 20 nt, synthetic construct
  misc_feature 1..20: note = HBV-targeting guide sequence portion
  source 1..20: mol_type = other RNA
ttaaagacaggtacagtaga

SEQ ID NO: 5872 - RNA, 20 nt, synthetic construct
  misc_feature 1..20: note = HBV-targeting guide sequence portion
  source 1..20: mol_type = other RNA
ttaaagactgggaggagttg

SEQ ID NO: 5873 - RNA, 20 nt, synthetic construct
  misc_feature 1..20: note = HBV-targeting guide sequence portion
  source 1..20: mol_type = other RNA
ttaaagcaggataaccacat

SEQ ID NO: 5874 - RNA, 20 nt, synthetic construct
  misc_feature 1..20: note = HBV-targeting guide sequence portion
  source 1..20: mol_type = other RNA
ttaaatgtacacccaaagac

SEQ ID NO: 5875 - RNA, 20 nt, synthetic construct
  misc_feature 1..20: note = HBV-targeting guide sequence portion
  source 1..20: mol_type = other RNA
ttaacaggcctattgattgg

SEQ ID NO: 5876 - RNA, 20 nt, synthetic construct
  misc_feature 1..20: note = HBV-targeting guide sequence portion
  source 1..20: mol_type = other RNA
ttaaccctcattggaaaaca

SEQ ID NO: 5877 - RNA, 20 nt, synthetic construct
  misc_feature 1..20: note = HBV-targeting guide sequence portion
  source 1..20: mol_type = other RNA
ttaaccgggagttttctgaa

SEQ ID NO: 5878 - RNA, 20 nt, synthetic construct
  misc_feature 1..20: note = HBV-targeting guide sequence portion
  source 1..20: mol_type = other RNA
ttaactagatgttctggata

SEQ ID NO: 5879 - RNA, 20 nt, synthetic construct
  misc_feature 1..20: note = HBV-targeting guide sequence portion
  source 1..20: mol_type = other RNA
ttaactgtaagcgggcctac

SEQ ID NO: 5880 - RNA, 20 nt, synthetic construct
  misc_feature 1..20: note = HBV-targeting guide sequence portion
  source 1..20: mol_type = other RNA
ttaagagaataaccccatct

SEQ ID NO: 5881 - RNA, 20 nt, synthetic construct
  misc_feature 1..20: note = HBV-targeting guide sequence portion
  source 1..20: mol_type = other RNA
ttaatacccttatccaaggg

SEQ ID NO: 5882 - RNA, 20 nt, synthetic construct
  misc_feature 1..20: note = HBV-targeting guide sequence portion
  source 1..20: mol_type = other RNA
ttaatcattacttccaaact

SEQ ID NO: 5883 - RNA, 20 nt, synthetic construct
  misc_feature 1..20: note = HBV-targeting guide sequence portion
  source 1..20: mol_type = other RNA
ttaatctaatctcctccccc

SEQ ID NO: 5884 - RNA, 20 nt, synthetic construct
  misc_feature 1..20: note = HBV-targeting guide sequence portion
  source 1..20: mol_type = other RNA
ttaatgagaaaagacggttg

SEQ ID NO: 5885 - RNA, 20 nt, synthetic construct
  misc_feature 1..20: note = HBV-targeting guide sequence portion
  source 1..20: mol_type = other RNA
ttaatgatctttgtactagg

SEQ ID NO: 5886 - RNA, 20 nt, synthetic construct
  misc_feature 1..20: note = HBV-targeting guide sequence portion
  source 1..20: mol_type = other RNA
ttaatgcccttgtatgcatg

SEQ ID NO: 5887 - RNA, 20 nt, synthetic construct
  misc_feature 1..20: note = HBV-targeting guide sequence portion
  source 1..20: mol_type = other RNA
ttaatttcatgggctatgtc

SEQ ID NO: 5888 - RNA, 20 nt, synthetic construct
  misc_feature 1..20: note = HBV-targeting guide sequence portion
  source 1..20: mol_type = other RNA
ttacaaggcctttctgtgta

SEQ ID NO: 5889 - RNA, 20 nt, synthetic construct
  misc_feature 1..20: note = HBV-targeting guide sequence portion
  source 1..20: mol_type = other RNA
ttacacaatgtggttatcct

SEQ ID NO: 5890 - RNA, 20 nt, synthetic construct
  misc_feature 1..20: note = HBV-targeting guide sequence portion
  source 1..20: mol_type = other RNA
ttacacactctatggaaggc

SEQ ID NO: 5891 - RNA, 20 nt, synthetic construct
  misc_feature 1..20: note = HBV-targeting guide sequence portion
  source 1..20: mol_type = other RNA
ttacacagaaaggccttgta

SEQ ID NO: 5892 - RNA, 20 nt, synthetic construct
  misc_feature 1..20: note = HBV-targeting guide sequence portion
  source 1..20: mol_type = other RNA
ttacaggcggggttttcctt

SEQ ID NO: 5893 - RNA, 20 nt, synthetic construct
  misc_feature 1..20: note = HBV-targeting guide sequence portion
  source 1..20: mol_type = other RNA
ttacagttaatgagaaaaga

SEQ ID NO: 5894 - RNA, 20 nt, synthetic construct
  misc_feature 1..20: note = HBV-targeting guide sequence portion
  source 1..20: mol_type = other RNA
ttacataagaggactcttgg

SEQ ID NO: 5895 - RNA, 20 nt, synthetic construct
  misc_feature 1..20: note = HBV-targeting guide sequence portion
  source 1..20: mol_type = other RNA
ttaccaattttcttttgtct

SEQ ID NO: 5896 - RNA, 20 nt, synthetic construct
  misc_feature 1..20: note = HBV-targeting guide sequence portion
  source 1..20: mol_type = other RNA
ttaccccgttgccaggcaac

SEQ ID NO: 5897 - RNA, 20 nt, synthetic construct
  misc_feature 1..20: note = HBV-targeting guide sequence portion
  source 1..20: mol_type = other RNA
ttacgcggactccccgtctg

SEQ ID NO: 5898 - RNA, 20 nt, synthetic construct
  misc_feature 1..20: note = HBV-targeting guide sequence portion
  source 1..20: mol_type = other RNA
ttacggggctttattcttct

SEQ ID NO: 5899 - RNA, 20 nt, synthetic construct
  misc_feature 1..20: note = HBV-targeting guide sequence portion
  source 1..20: mol_type = other RNA
ttacgtcccgtcggcgctga

SEQ ID NO: 5900 - RNA, 20 nt, synthetic construct
  misc_feature 1..20: note = HBV-targeting guide sequence portion
  source 1..20: mol_type = other RNA
ttactagtgccatttgttca

SEQ ID NO: 5901 - RNA, 20 nt, synthetic construct
  misc_feature 1..20: note = HBV-targeting guide sequence portion
  source 1..20: mol_type = other RNA
ttactctcgtttttgccttc

SEQ ID NO: 5902 - RNA, 20 nt, synthetic construct
  misc_feature 1..20: note = HBV-targeting guide sequence portion
  source 1..20: mol_type = other RNA
ttactgttcctgaactggag

SEQ ID NO: 5903 - RNA, 20 nt, synthetic construct
  misc_feature 1..20: note = HBV-targeting guide sequence portion
  source 1..20: mol_type = other RNA
ttacttccaaactagacact

SEQ ID NO: 5904 - RNA, 20 nt, synthetic construct
  misc_feature 1..20: note = HBV-targeting guide sequence portion
  source 1..20: mol_type = other RNA
ttacttttggaagagaaacg

SEQ ID NO: 5905 - RNA, 20 nt, synthetic construct
  misc_feature 1..20: note = HBV-targeting guide sequence portion
  source 1..20: mol_type = other RNA
ttagaagatcaagcatctag

SEQ ID NO: 5906 - RNA, 20 nt, synthetic construct
  misc_feature 1..20: note = HBV-targeting guide sequence portion
  source 1..20: mol_type = other RNA
ttagacgacgaggcaggtcc

SEQ ID NO: 5907 - RNA, 20 nt, synthetic construct
  misc_feature 1..20: note = HBV-targeting guide sequence portion
  source 1..20: mol_type = other RNA
ttagaggacagacgggaaac

SEQ ID NO: 5908 - RNA, 20 nt, synthetic construct
  misc_feature 1..20: note = HBV-targeting guide sequence portion
  source 1..20: mol_type = other RNA
ttagattaatgatctttgta

SEQ ID NO: 5909 - RNA, 20 nt, synthetic construct
  misc_feature 1..20: note = HBV-targeting guide sequence portion
  source 1..20: mol_type = other RNA
ttagattgaatacatgcata

SEQ ID NO: 5910 - RNA, 20 nt, synthetic construct
  misc_feature 1..20: note = HBV-targeting guide sequence portion
  source 1..20: mol_type = other RNA
ttaggaaaagagggtgtttt

SEQ ID NO: 5911 - RNA, 20 nt, synthetic construct
  misc_feature 1..20: note = HBV-targeting guide sequence portion
  source 1..20: mol_type = other RNA
ttaggataaaacctagcagg

SEQ ID NO: 5912 - RNA, 20 nt, synthetic construct
  misc_feature 1..20: note = HBV-targeting guide sequence portion
  source 1..20: mol_type = other RNA
ttaggcagaggtgaaaaagt

SEQ ID NO: 5913 - RNA, 20 nt, synthetic construct
  misc_feature 1..20: note = HBV-targeting guide sequence portion
  source 1..20: mol_type = other RNA
ttaggcccatatgagtgttg

SEQ ID NO: 5914 - RNA, 20 nt, synthetic construct
  misc_feature 1..20: note = HBV-targeting guide sequence portion
  source 1..20: mol_type = other RNA
ttagggcatggacattgacc

SEQ ID NO: 5915 - RNA, 20 nt, synthetic construct
  misc_feature 1..20: note = HBV-targeting guide sequence portion
  source 1..20: mol_type = other RNA
ttagggtttaaatgtacacc

SEQ ID NO: 5916 - RNA, 20 nt, synthetic construct
  misc_feature 1..20: note = HBV-targeting guide sequence portion
  source 1..20: mol_type = other RNA
ttagtacccacccaggtagc

SEQ ID NO: 5917 - RNA, 20 nt, synthetic construct
  misc_feature 1..20: note = HBV-targeting guide sequence portion
  source 1..20: mol_type = other RNA
ttagtatcccttggactcat

SEQ ID NO: 5918 - RNA, 20 nt, synthetic construct
  misc_feature 1..20: note = HBV-targeting guide sequence portion
  source 1..20: mol_type = other RNA
ttagttctccccagcaaaga

SEQ ID NO: 5919 - RNA, 20 nt, synthetic construct
  misc_feature 1..20: note = HBV-targeting guide sequence portion
  source 1..20: mol_type = other RNA
ttataccgctgttaccaatt

SEQ ID NO: 5920 - RNA, 20 nt, synthetic construct
  misc_feature 1..20: note = HBV-targeting guide sequence portion
  source 1..20: mol_type = other RNA
ttatagaccaccaaatgccc

SEQ ID NO: 5921 - RNA, 20 nt, synthetic construct
  misc_feature 1..20: note = HBV-targeting guide sequence portion
  source 1..20: mol_type = other RNA
ttatataaaacacccgcctt

SEQ ID NO: 5922 - RNA, 20 nt, synthetic construct
  misc_feature 1..20: note = HBV-targeting guide sequence portion
  source 1..20: mol_type = other RNA
ttatataagagagtgtcaac

SEQ ID NO: 5923 - RNA, 20 nt, synthetic construct
  misc_feature 1..20: note = HBV-targeting guide sequence portion
  source 1..20: mol_type = other RNA
ttatatggatgatgtggtat

SEQ ID NO: 5924 - RNA, 20 nt, synthetic construct
  misc_feature 1..20: note = HBV-targeting guide sequence portion
  source 1..20: mol_type = other RNA
ttatatgggtcaatgtccat

SEQ ID NO: 5925 - RNA, 20 nt, synthetic construct
  misc_feature 1..20: note = HBV-targeting guide sequence portion
  source 1..20: mol_type = other RNA
ttatcaaaaaatgtgaacag

SEQ ID NO: 5926 - RNA, 20 nt, synthetic construct
  misc_feature 1..20: note = HBV-targeting guide sequence portion
  source 1..20: mol_type = other RNA
ttatcatcttcctcttcatc

SEQ ID NO: 5927 - RNA, 20 nt, synthetic construct
  misc_feature 1..20: note = HBV-targeting guide sequence portion
  source 1..20: mol_type = other RNA
ttatccaagggcaagtattt

SEQ ID NO: 5928 - RNA, 20 nt, synthetic construct
  misc_feature 1..20: note = HBV-targeting guide sequence portion
  source 1..20: mol_type = other RNA
ttatccagaacatctagtta

SEQ ID NO: 5929 - RNA, 20 nt, synthetic construct
  misc_feature 1..20: note = HBV-targeting guide sequence portion
  source 1..20: mol_type = other RNA
ttatcctaaattcaccaaat

SEQ ID NO: 5930 - RNA, 20 nt, synthetic construct
  misc_feature 1..20: note = HBV-targeting guide sequence portion
  source 1..20: mol_type = other RNA
ttatcctgctttaatgccct

SEQ ID NO: 5931 - RNA, 20 nt, synthetic construct
  misc_feature 1..20: note = HBV-targeting guide sequence portion
  source 1..20: mol_type = other RNA
ttatcgctggatgtgtctgc

SEQ ID NO: 5932 - RNA, 20 nt, synthetic construct
  misc_feature 1..20: note = HBV-targeting guide sequence portion
  source 1..20: mol_type = other RNA
ttatgagtccaagggatact

SEQ ID NO: 5933 - RNA, 20 nt, synthetic construct
  misc_feature 1..20: note = HBV-targeting guide sequence portion
  source 1..20: mol_type = other RNA
ttatgccctgagcctgaggg

SEQ ID NO: 5934 - RNA, 20 nt, synthetic construct
  misc_feature 1..20: note = HBV-targeting guide sequence portion
  source 1..20: mol_type = other RNA
ttatgcctacagcctcctag

SEQ ID NO: 5935 - RNA, 20 nt, synthetic construct
  misc_feature 1..20: note = HBV-targeting guide sequence portion
  source 1..20: mol_type = other RNA
ttatgcctgctaggttttat

SEQ ID NO: 5936 - RNA, 20 nt, synthetic construct
  misc_feature 1..20: note = HBV-targeting guide sequence portion
  source 1..20: mol_type = other RNA
ttatgtaagaccttgggcaa

SEQ ID NO: 5937 - RNA, 20 nt, synthetic construct
  misc_feature 1..20: note = HBV-targeting guide sequence portion
  source 1..20: mol_type = other RNA
ttatgtcaacactcatatgg

SEQ ID NO: 5938 - RNA, 20 nt, synthetic construct
  misc_feature 1..20: note = HBV-targeting guide sequence portion
  source 1..20: mol_type = other RNA
ttattatccagaacatctag

SEQ ID NO: 5939 - RNA, 20 nt, synthetic construct
  misc_feature 1..20: note = HBV-targeting guide sequence portion
  source 1..20: mol_type = other RNA
ttattctcttaatttcatgg

SEQ ID NO: 5940 - RNA, 20 nt, synthetic construct
  misc_feature 1..20: note = HBV-targeting guide sequence portion
  source 1..20: mol_type = other RNA
ttattcttctactgtacctg

SEQ ID NO: 5941 - RNA, 20 nt, synthetic construct
  misc_feature 1..20: note = HBV-targeting guide sequence portion
  source 1..20: mol_type = other RNA
ttcaaagactgtttgtttaa

SEQ ID NO: 5942 - RNA, 20 nt, synthetic construct
  misc_feature 1..20: note = HBV-targeting guide sequence portion
  source 1..20: mol_type = other RNA
ttcaaccgtcttttctcatt

SEQ ID NO: 5943 - RNA, 20 nt, synthetic construct
  misc_feature 1..20: note = HBV-targeting guide sequence portion
  source 1..20: mol_type = other RNA
ttcaagcctccaagctgtgc

SEQ ID NO: 5944 - RNA, 20 nt, synthetic construct
  misc_feature 1..20: note = HBV-targeting guide sequence portion
  source 1..20: mol_type = other RNA
ttcaatcccaacaaggatcc

SEQ ID NO: 5945 - RNA, 20 nt, synthetic construct
  misc_feature 1..20: note = HBV-targeting guide sequence portion
  source 1..20: mol_type = other RNA
ttcaatctaagcaggctttc

SEQ ID NO: 5946 - RNA, 20 nt, synthetic construct
  misc_feature 1..20: note = HBV-targeting guide sequence portion
  source 1..20: mol_type = other RNA
ttcacatttcttgtcttact

SEQ ID NO: 5947 - RNA, 20 nt, synthetic construct
  misc_feature 1..20: note = HBV-targeting guide sequence portion
  source 1..20: mol_type = other RNA
ttcacattttttgataatat

SEQ ID NO: 5948 - RNA, 20 nt, synthetic construct
  misc_feature 1..20: note = HBV-targeting guide sequence portion
  source 1..20: mol_type = other RNA
ttcaccaaatacttgccctt

SEQ ID NO: 5949 - RNA, 20 nt, synthetic construct
  misc_feature 1..20: note = HBV-targeting guide sequence portion
  source 1..20: mol_type = other RNA
ttcaccccaccgcacggagg

SEQ ID NO: 5950 - RNA, 20 nt, synthetic construct
  misc_feature 1..20: note = HBV-targeting guide sequence portion
  source 1..20: mol_type = other RNA
ttcacctcaccatactgcac

SEQ ID NO: 5951 - RNA, 20 nt, synthetic construct
  misc_feature 1..20: note = HBV-targeting guide sequence portion
  source 1..20: mol_type = other RNA
ttcacctctgcacgtcgcat

SEQ ID NO: 5952 - RNA, 20 nt, synthetic construct
  misc_feature 1..20: note = HBV-targeting guide sequence portion
  source 1..20: mol_type = other RNA
ttcacctctgcctaatcatc

SEQ ID NO: 5953 - RNA, 20 nt, synthetic construct
  misc_feature 1..20: note = HBV-targeting guide sequence portion
  source 1..20: mol_type = other RNA
ttcacggtggtctccatgcg

SEQ ID NO: 5954 - RNA, 20 nt, synthetic construct
  misc_feature 1..20: note = HBV-targeting guide sequence portion
  source 1..20: mol_type = other RNA
ttcactttttcgccaactta

SEQ ID NO: 5955 - RNA, 20 nt, synthetic construct
  misc_feature 1..20: note = HBV-targeting guide sequence portion
  source 1..20: mol_type = other RNA
ttcagaaaactcccggttaa

SEQ ID NO: 5956 - RNA, 20 nt, synthetic construct
  misc_feature 1..20: note = HBV-targeting guide sequence portion
  source 1..20: mol_type = other RNA
ttcagacaactattgtggtt

SEQ ID NO: 5957 - RNA, 20 nt, synthetic construct
  misc_feature 1..20: note = HBV-targeting guide sequence portion
  source 1..20: mol_type = other RNA
ttcagagcaaactccaacaa

SEQ ID NO: 5958 - RNA, 20 nt, synthetic construct
  misc_feature 1..20: note = HBV-targeting guide sequence portion
  source 1..20: mol_type = other RNA
ttcagcgcagggtccccaat

SEQ ID NO: 5959 - RNA, 20 nt, synthetic construct
  misc_feature 1..20: note = HBV-targeting guide sequence portion
  source 1..20: mol_type = other RNA
ttcagcgccgacgggacgta

SEQ ID NO: 5960 - RNA, 20 nt, synthetic construct
  misc_feature 1..20: note = HBV-targeting guide sequence portion
  source 1..20: mol_type = other RNA
ttcaggaacagtaaaccctg

SEQ ID NO: 5961 - RNA, 20 nt, synthetic construct
  misc_feature 1..20: note = HBV-targeting guide sequence portion
  source 1..20: mol_type = other RNA
ttcaggtattgtttacacag

SEQ ID NO: 5962 - RNA, 20 nt, synthetic construct
  misc_feature 1..20: note = HBV-targeting guide sequence portion
  source 1..20: mol_type = other RNA
ttcagtggttcgtagggctt

SEQ ID NO: 5963 - RNA, 20 nt, synthetic construct
  misc_feature 1..20: note = HBV-targeting guide sequence portion
  source 1..20: mol_type = other RNA
ttcagttatatggatgatgt

SEQ ID NO: 5964 - RNA, 20 nt, synthetic construct
  misc_feature 1..20: note = HBV-targeting guide sequence portion
  source 1..20: mol_type = other RNA
ttcatcctgctgctatgcct

SEQ ID NO: 5965 - RNA, 20 nt, synthetic construct
  misc_feature 1..20: note = HBV-targeting guide sequence portion
  source 1..20: mol_type = other RNA
ttcatgggctatgtcattga

SEQ ID NO: 5966 - RNA, 20 nt, synthetic construct
  misc_feature 1..20: note = HBV-targeting guide sequence portion
  source 1..20: mol_type = other RNA
ttcatgtcctactgttcaag

SEQ ID NO: 5967 - RNA, 20 nt, synthetic construct
  misc_feature 1..20: note = HBV-targeting guide sequence portion
  source 1..20: mol_type = other RNA
ttccaaaagtaagacaagaa

SEQ ID NO: 5968 - RNA, 20 nt, synthetic construct
  misc_feature 1..20: note = HBV-targeting guide sequence portion
  source 1..20: mol_type = other RNA
ttccaaactagacactattt

SEQ ID NO: 5969 - RNA, 20 nt, synthetic construct
  misc_feature 1..20: note = HBV-targeting guide sequence portion
  source 1..20: mol_type = other RNA
ttccaatcaataggcctgtt

SEQ ID NO: 5970 - RNA, 20 nt, synthetic construct
  misc_feature 1..20: note = HBV-targeting guide sequence portion
  source 1..20: mol_type = other RNA
ttccaatgagggttaaagac

SEQ ID NO: 5971 - RNA, 20 nt, synthetic construct
  misc_feature 1..20: note = HBV-targeting guide sequence portion
  source 1..20: mol_type = other RNA
ttccaccaaactctgcaaga

SEQ ID NO: 5972 - RNA, 20 nt, synthetic construct
  misc_feature 1..20: note = HBV-targeting guide sequence portion
  source 1..20: mol_type = other RNA
ttccaccagcaatcctctgg

SEQ ID NO: 5973 - RNA, 20 nt, synthetic construct
  misc_feature 1..20: note = HBV-targeting guide sequence portion
  source 1..20: mol_type = other RNA
ttccacgcatgcgctgatgg

SEQ ID NO: 5974 - RNA, 20 nt, synthetic construct
  misc_feature 1..20: note = HBV-targeting guide sequence portion
  source 1..20: mol_type = other RNA
ttccaggatcatcaaccacc

SEQ ID NO: 5975 - RNA, 20 nt, synthetic construct
  misc_feature 1..20: note = HBV-targeting guide sequence portion
  source 1..20: mol_type = other RNA
ttccatagagtgtgtaaata

SEQ ID NO: 5976 - RNA, 20 nt, synthetic construct
  misc_feature 1..20: note = HBV-targeting guide sequence portion
  source 1..20: mol_type = other RNA
ttccatccgaaggttttgta

SEQ ID NO: 5977 - RNA, 20 nt, synthetic construct
  misc_feature 1..20: note = HBV-targeting guide sequence portion
  source 1..20: mol_type = other RNA
ttcccaagaatatggtgacc

SEQ ID NO: 5978 - RNA, 20 nt, synthetic construct
  misc_feature 1..20: note = HBV-targeting guide sequence portion
  source 1..20: mol_type = other RNA
ttcccaccttatgagtccaa

SEQ ID NO: 5979 - RNA, 20 nt, synthetic construct
  misc_feature 1..20: note = HBV-targeting guide sequence portion
  source 1..20: mol_type = other RNA
ttcccatcccatcatcctgg

SEQ ID NO: 5980 - RNA, 20 nt, synthetic construct
  misc_feature 1..20: note = HBV-targeting guide sequence portion
  source 1..20: mol_type = other RNA
ttcccatggctgctaggctg

SEQ ID NO: 5981 - RNA, 20 nt, synthetic construct
  misc_feature 1..20: note = HBV-targeting guide sequence portion
  source 1..20: mol_type = other RNA
ttcccccactgtttggcttt

SEQ ID NO: 5982 - RNA, 20 nt, synthetic construct
  misc_feature 1..20: note = HBV-targeting guide sequence portion
  source 1..20: mol_type = other RNA
ttccccctagaaaattgaga

SEQ ID NO: 5983 - RNA, 20 nt, synthetic construct
  misc_feature 1..20: note = HBV-targeting guide sequence portion
  source 1..20: mol_type = other RNA
ttcccgaccaccagttggac

SEQ ID NO: 5984 - RNA, 20 nt, synthetic construct
  misc_feature 1..20: note = HBV-targeting guide sequence portion
  source 1..20: mol_type = other RNA
ttcccgtctgtcctctaatt

SEQ ID NO: 5985 - RNA, 20 nt, synthetic construct
  misc_feature 1..20: note = HBV-targeting guide sequence portion
  source 1..20: mol_type = other RNA
ttccgaaagcccaggatgat

SEQ ID NO: 5986 - RNA, 20 nt, synthetic construct
  misc_feature 1..20: note = HBV-targeting guide sequence portion
  source 1..20: mol_type = other RNA
ttccgaccgaccacggggcg

SEQ ID NO: 5987 - RNA, 20 nt, synthetic construct
  misc_feature 1..20: note = HBV-targeting guide sequence portion
  source 1..20: mol_type = other RNA
ttccgactactgcctctcac

SEQ ID NO: 5988 - RNA, 20 nt, synthetic construct
  misc_feature 1..20: note = HBV-targeting guide sequence portion
  source 1..20: mol_type = other RNA
ttccgcagtatggatcggca

SEQ ID NO: 5989 - RNA, 20 nt, synthetic construct
  misc_feature 1..20: note = HBV-targeting guide sequence portion
  source 1..20: mol_type = other RNA
ttccggagacttgtgttgtt

SEQ ID NO: 5990 - RNA, 20 nt, synthetic construct
  misc_feature 1..20: note = HBV-targeting guide sequence portion
  source 1..20: mol_type = other RNA
ttccggctcctctgccgatc

SEQ ID NO: 5991 - RNA, 20 nt, synthetic construct
  misc_feature 1..20: note = HBV-targeting guide sequence portion
  source 1..20: mol_type = other RNA
ttccgtacgagatcttctag

SEQ ID NO: 5992 - RNA, 20 nt, synthetic construct
  misc_feature 1..20: note = HBV-targeting guide sequence portion
  source 1..20: mol_type = other RNA
ttcctaatatacatctacac

SEQ ID NO: 5993 - RNA, 20 nt, synthetic construct
  misc_feature 1..20: note = HBV-targeting guide sequence portion
  source 1..20: mol_type = other RNA
ttcctaggacccctgctcgt

SEQ ID NO: 5994 - RNA, 20 nt, synthetic construct
  misc_feature 1..20: note = HBV-targeting guide sequence portion
  source 1..20: mol_type = other RNA
ttcctatgggagtgggcctc

SEQ ID NO: 5995 - RNA, 20 nt, synthetic construct
  misc_feature 1..20: note = HBV-targeting guide sequence portion
  source 1..20: mol_type = other RNA
ttcctcttcatcctgctgct

SEQ ID NO: 5996 - RNA, 20 nt, synthetic construct
  misc_feature 1..20: note = HBV-targeting guide sequence portion
  source 1..20: mol_type = other RNA
ttcctgaactggagccacca

SEQ ID NO: 5997 - RNA, 20 nt, synthetic construct
  misc_feature 1..20: note = HBV-targeting guide sequence portion
  source 1..20: mol_type = other RNA
ttccttccgtacgagatctt

SEQ ID NO: 5998 - RNA, 20 nt, synthetic construct
  misc_feature 1..20: note = HBV-targeting guide sequence portion
  source 1..20: mol_type = other RNA
ttccttgagcaggagtcgtg

SEQ ID NO: 5999 - RNA, 20 nt, synthetic construct
  misc_feature 1..20: note = HBV-targeting guide sequence portion
  source 1..20: mol_type = other RNA
ttccttgttgacaagaatcc

SEQ ID NO: 6000 - RNA, 20 nt, synthetic construct
  misc_feature 1..20: note = HBV-targeting guide sequence portion
  source 1..20: mol_type = other RNA
ttcgcactcctccagcttat

SEQ ID NO: 6001 - RNA, 20 nt, synthetic construct
  misc_feature 1..20: note = HBV-targeting guide sequence portion
  source 1..20: mol_type = other RNA
ttcgcagtccccaacctcca

SEQ ID NO: 6002 - RNA, 20 nt, synthetic construct
  misc_feature 1..20: note = HBV-targeting guide sequence portion
  source 1..20: mol_type = other RNA
ttcgccaacttacaaggcct

SEQ ID NO: 6003 - RNA, 20 nt, synthetic construct
  misc_feature 1..20: note = HBV-targeting guide sequence portion
  source 1..20: mol_type = other RNA
ttcgcttcacctctgcacgt

SEQ ID NO: 6004 - RNA, 20 nt, synthetic construct
  misc_feature 1..20: note = HBV-targeting guide sequence portion
  source 1..20: mol_type = other RNA
ttcggaaaattcctatggga

SEQ ID NO: 6005 - RNA, 20 nt, synthetic construct
  misc_feature 1..20: note = HBV-targeting guide sequence portion
  source 1..20: mol_type = other RNA
ttcggatggaaactgcacct

SEQ ID NO: 6006 - RNA, 20 nt, synthetic construct
  misc_feature 1..20: note = HBV-targeting guide sequence portion
  source 1..20: mol_type = other RNA
ttcgggctagggttcacccc

SEQ ID NO: 6007 - RNA, 20 nt, synthetic construct
  misc_feature 1..20: note = HBV-targeting guide sequence portion
  source 1..20: mol_type = other RNA
ttcgtagggctttcccccac

SEQ ID NO: 6008 - RNA, 20 nt, synthetic construct
  misc_feature 1..20: note = HBV-targeting guide sequence portion
  source 1..20: mol_type = other RNA
ttcgtctgcgaggcgaggga

SEQ ID NO: 6009 - RNA, 20 nt, synthetic construct
  misc_feature 1..20: note = HBV-targeting guide sequence portion
  source 1..20: mol_type = other RNA
ttcgttgacacactttccaa

SEQ ID NO: 6010 - RNA, 20 nt, synthetic construct
  misc_feature 1..20: note = HBV-targeting guide sequence portion
  source 1..20: mol_type = other RNA
ttctaaattagtacccaccc

SEQ ID NO: 6011 - RNA, 20 nt, synthetic construct
  misc_feature 1..20: note = HBV-targeting guide sequence portion
  source 1..20: mol_type = other RNA
ttctactgtacctgtcttta

SEQ ID NO: 6012 - RNA, 20 nt, synthetic construct
  misc_feature 1..20: note = HBV-targeting guide sequence portion
  source 1..20: mol_type = other RNA
ttctagataccgccgcagct

SEQ ID NO: 6013 - RNA, 20 nt, synthetic construct
  misc_feature 1..20: note = HBV-targeting guide sequence portion
  source 1..20: mol_type = other RNA
ttctaggggacctgcctcgt

SEQ ID NO: 6014 - RNA, 20 nt, synthetic construct
  misc_feature 1..20: note = HBV-targeting guide sequence portion
  source 1..20: mol_type = other RNA
ttctagggggaactaccgtg

SEQ ID NO: 6015 - RNA, 20 nt, synthetic construct
  misc_feature 1..20: note = HBV-targeting guide sequence portion
  source 1..20: mol_type = other RNA
ttctcagaggtggagacagc

SEQ ID NO: 6016 - RNA, 20 nt, synthetic construct
  misc_feature 1..20: note = HBV-targeting guide sequence portion
  source 1..20: mol_type = other RNA
ttctcatctgccggaccgtg

SEQ ID NO: 6017 - RNA, 20 nt, synthetic construct
  misc_feature 1..20: note = HBV-targeting guide sequence portion
  source 1..20: mol_type = other RNA
ttctcattaactgtaagcgg

SEQ ID NO: 6018 - RNA, 20 nt, synthetic construct
  misc_feature 1..20: note = HBV-targeting guide sequence portion
  source 1..20: mol_type = other RNA
ttctccatgttcagcgcagg

SEQ ID NO: 6019 - RNA, 20 nt, synthetic construct
  misc_feature 1..20: note = HBV-targeting guide sequence portion
  source 1..20: mol_type = other RNA
ttctccccagcaaagaattg

SEQ ID NO: 6020 - RNA, 20 nt, synthetic construct
  misc_feature 1..20: note = HBV-targeting guide sequence portion
  source 1..20: mol_type = other RNA
ttctcgaggattggggaccc

SEQ ID NO: 6021 - RNA, 20 nt, synthetic construct
  misc_feature 1..20: note = HBV-targeting guide sequence portion
  source 1..20: mol_type = other RNA
ttctcgggactgacaactct

SEQ ID NO: 6022 - RNA, 20 nt, synthetic construct
  misc_feature 1..20: note = HBV-targeting guide sequence portion
  source 1..20: mol_type = other RNA
ttctctcaattttctagggg

SEQ ID NO: 6023 - RNA, 20 nt, synthetic construct
  misc_feature 1..20: note = HBV-targeting guide sequence portion
  source 1..20: mol_type = other RNA
ttctctgcctgccgttccga

SEQ ID NO: 6024 - RNA, 20 nt, synthetic construct
  misc_feature 1..20: note = HBV-targeting guide sequence portion
  source 1..20: mol_type = other RNA
ttctcttaatttcatgggct

SEQ ID NO: 6025 - RNA, 20 nt, synthetic construct
  misc_feature 1..20: note = HBV-targeting guide sequence portion
  source 1..20: mol_type = other RNA
ttctcttccaaaagtaagac

SEQ ID NO: 6026 - RNA, 20 nt, synthetic construct
  misc_feature 1..20: note = HBV-targeting guide sequence portion
  source 1..20: mol_type = other RNA
ttctcttggctcagtttact

SEQ ID NO: 6027 - RNA, 20 nt, synthetic construct
  misc_feature 1..20: note = HBV-targeting guide sequence portion
  source 1..20: mol_type = other RNA
ttctgaaacattctttgatt

SEQ ID NO: 6028 - RNA, 20 nt, synthetic construct
  misc_feature 1..20: note = HBV-targeting guide sequence portion
  source 1..20: mol_type = other RNA
ttctgacttctttccttccg

SEQ ID NO: 6029 - RNA, 20 nt, synthetic construct
  misc_feature 1..20: note = HBV-targeting guide sequence portion
  source 1..20: mol_type = other RNA
ttctgcagggtcccgtgctg

SEQ ID NO: 6030 - RNA, 20 nt, synthetic construct
  misc_feature 1..20: note = HBV-targeting guide sequence portion
  source 1..20: mol_type = other RNA
ttctgccccatgctgtagct

SEQ ID NO: 6031 - RNA, 20 nt, synthetic construct
  misc_feature 1..20: note = HBV-targeting guide sequence portion
  source 1..20: mol_type = other RNA
ttctgcgacgcggcgattga

SEQ ID NO: 6032 - RNA, 20 nt, synthetic construct
  misc_feature 1..20: note = HBV-targeting guide sequence portion
  source 1..20: mol_type = other RNA
ttctggactatcaaggtatg

SEQ ID NO: 6033 - RNA, 20 nt, synthetic construct
  misc_feature 1..20: note = HBV-targeting guide sequence portion
  source 1..20: mol_type = other RNA
ttctggataataaggtttaa

SEQ ID NO: 6034 - RNA, 20 nt, synthetic construct
  misc_feature 1..20: note = HBV-targeting guide sequence portion
  source 1..20: mol_type = other RNA
ttctgggttttgctgcccct

SEQ ID NO: 6035 - RNA, 20 nt, synthetic construct
  misc_feature 1..20: note = HBV-targeting guide sequence portion
  source 1..20: mol_type = other RNA
ttctgtgggtcaccatattc

SEQ ID NO: 6036 - RNA, 20 nt, synthetic construct
  misc_feature 1..20: note = HBV-targeting guide sequence portion
  source 1..20: mol_type = other RNA
ttctgtgtaaacaatacctg

SEQ ID NO: 6037 - RNA, 20 nt, synthetic construct
  misc_feature 1..20: note = HBV-targeting guide sequence portion
  source 1..20: mol_type = other RNA
ttcttctactgtacctgtct

SEQ ID NO: 6038 - RNA, 20 nt, synthetic construct
  misc_feature 1..20: note = HBV-targeting guide sequence portion
  source 1..20: mol_type = other RNA
ttcttctaggggacctgcct

SEQ ID NO: 6039 - RNA, 20 nt, synthetic construct
  misc_feature 1..20: note = HBV-targeting guide sequence portion
  source 1..20: mol_type = other RNA
ttcttctggactatcaaggt

SEQ ID NO: 6040 - RNA, 20 nt, synthetic construct
  misc_feature 1..20: note = HBV-targeting guide sequence portion
  source 1..20: mol_type = other RNA
ttcttcttctaggggacctg

SEQ ID NO: 6041 - RNA, 20 nt, synthetic construct
  misc_feature 1..20: note = HBV-targeting guide sequence portion
  source 1..20: mol_type = other RNA
ttcttgcccaaggtcttaca

SEQ ID NO: 6042 - RNA, 20 nt, synthetic construct
  misc_feature 1..20: note = HBV-targeting guide sequence portion
  source 1..20: mol_type = other RNA
ttcttgggaacaagagctac

SEQ ID NO: 6043 - RNA, 20 nt, synthetic construct
  misc_feature 1..20: note = HBV-targeting guide sequence portion
  source 1..20: mol_type = other RNA
ttcttgtcaacaaggaaaac

SEQ ID NO: 6044 - RNA, 20 nt, synthetic construct
  misc_feature 1..20: note = HBV-targeting guide sequence portion
  source 1..20: mol_type = other RNA
ttcttgtcttacttttggaa

SEQ ID NO: 6045 - RNA, 20 nt, synthetic construct
  misc_feature 1..20: note = HBV-targeting guide sequence portion
  source 1..20: mol_type = other RNA
ttcttgttggttcttctgga

SEQ ID NO: 6046 - RNA, 20 nt, synthetic construct
  misc_feature 1..20: note = HBV-targeting guide sequence portion
  source 1..20: mol_type = other RNA
ttctttatatgggtcaatgt

SEQ ID NO: 6047 - RNA, 20 nt, synthetic construct
  misc_feature 1..20: note = HBV-targeting guide sequence portion
  source 1..20: mol_type = other RNA
ttctttcccgaccaccagtt

SEQ ID NO: 6048 - RNA, 20 nt, synthetic construct
  misc_feature 1..20: note = HBV-targeting guide sequence portion
  source 1..20: mol_type = other RNA
ttctttccttccgtacgaga

SEQ ID NO: 6049 - RNA, 20 nt, synthetic construct
  misc_feature 1..20: note = HBV-targeting guide sequence portion
  source 1..20: mol_type = other RNA
ttctttgattttgtgtatga

SEQ ID NO: 6050 - RNA, 20 nt, synthetic construct
  misc_feature 1..20: note = HBV-targeting guide sequence portion
  source 1..20: mol_type = other RNA
ttctttgctggggagaacta

SEQ ID NO: 6051 - RNA, 20 nt, synthetic construct
  misc_feature 1..20: note = HBV-targeting guide sequence portion
  source 1..20: mol_type = other RNA
ttcttttgtctttgggtgta

SEQ ID NO: 6052 - RNA, 20 nt, synthetic construct
  misc_feature 1..20: note = HBV-targeting guide sequence portion
  source 1..20: mol_type = other RNA
ttgaaattgattatgcctgc

SEQ ID NO: 6053 - RNA, 20 nt, synthetic construct
  misc_feature 1..20: note = HBV-targeting guide sequence portion
  source 1..20: mol_type = other RNA
ttgaacagtaggacatgaac

SEQ ID NO: 6054 - RNA, 20 nt, synthetic construct
  misc_feature 1..20: note = HBV-targeting guide sequence portion
  source 1..20: mol_type = other RNA
ttgaagtatgcctcaaggtc

SEQ ID NO: 6055 - RNA, 20 nt, synthetic construct
  misc_feature 1..20: note = HBV-targeting guide sequence portion
  source 1..20: mol_type = other RNA
ttgaagtcccaatctggatt

SEQ ID NO: 6056 - RNA, 20 nt, synthetic construct
  misc_feature 1..20: note = HBV-targeting guide sequence portion
  source 1..20: mol_type = other RNA
ttgaatacatgcatacaagg

SEQ ID NO: 6057 - RNA, 20 nt, synthetic construct
  misc_feature 1..20: note = HBV-targeting guide sequence portion
  source 1..20: mol_type = other RNA
ttgacaagaatcctcacaat

SEQ ID NO: 6058 - RNA, 20 nt, synthetic construct
  misc_feature 1..20: note = HBV-targeting guide sequence portion
  source 1..20: mol_type = other RNA
ttgacacactttccaatcaa

SEQ ID NO: 6059 - RNA, 20 nt, synthetic construct
  misc_feature 1..20: note = HBV-targeting guide sequence portion
  source 1..20: mol_type = other RNA
ttgacactctcttatataaa

SEQ ID NO: 6060 - RNA, 20 nt, synthetic construct
  misc_feature 1..20: note = HBV-targeting guide sequence portion
  source 1..20: mol_type = other RNA
ttgacataactgactactag

SEQ ID NO: 6061 - RNA, 20 nt, synthetic construct
  misc_feature 1..20: note = HBV-targeting guide sequence portion
  source 1..20: mol_type = other RNA
ttgacattgcagagagtcca

SEQ ID NO: 6062 - RNA, 20 nt, synthetic construct
  misc_feature 1..20: note = HBV-targeting guide sequence portion
  source 1..20: mol_type = other RNA
ttgacccatataaagaattt

SEQ ID NO: 6063 - RNA, 20 nt, synthetic construct
  misc_feature 1..20: note = HBV-targeting guide sequence portion
  source 1..20: mol_type = other RNA
ttgacgatatgtgagaggca

SEQ ID NO: 6064 - RNA, 20 nt, synthetic construct
  misc_feature 1..20: note = HBV-targeting guide sequence portion
  source 1..20: mol_type = other RNA
ttgagagaagtccaccacga

SEQ ID NO: 6065 - RNA, 20 nt, synthetic construct
  misc_feature 1..20: note = HBV-targeting guide sequence portion
  source 1..20: mol_type = other RNA
ttgagatccccgagattgag

SEQ ID NO: 6066 - RNA, 20 nt, synthetic construct
  misc_feature 1..20: note = HBV-targeting guide sequence portion
  source 1..20: mol_type = other RNA
ttgagatcttcgtctgcgag

SEQ ID NO: 6067 - RNA, 20 nt, synthetic construct
  misc_feature 1..20: note = HBV-targeting guide sequence portion
  source 1..20: mol_type = other RNA
ttgagatcttctgcgacgcg

SEQ ID NO: 6068 - RNA, 20 nt, synthetic construct
  misc_feature 1..20: note = HBV-targeting guide sequence portion
  source 1..20: mol_type = other RNA
ttgagcaggagtcgtgcagg

SEQ ID NO: 6069 - RNA, 20 nt, synthetic construct
  misc_feature 1..20: note = HBV-targeting guide sequence portion
  source 1..20: mol_type = other RNA
ttgaggcatacttcaaagac

SEQ ID NO: 6070 - RNA, 20 nt, synthetic construct
  misc_feature 1..20: note = HBV-targeting guide sequence portion
  source 1..20: mol_type = other RNA
ttgagtccctttataccgct

SEQ ID NO: 6071 - RNA, 20 nt, synthetic construct
  misc_feature 1..20: note = HBV-targeting guide sequence portion
  source 1..20: mol_type = other RNA
ttgataatatcttggtgtag

SEQ ID NO: 6072 - RNA, 20 nt, synthetic construct
  misc_feature 1..20: note = HBV-targeting guide sequence portion
  source 1..20: mol_type = other RNA
ttgataggataggggcattt

SEQ ID NO: 6073 - RNA, 20 nt, synthetic construct
  misc_feature 1..20: note = HBV-targeting guide sequence portion
  source 1..20: mol_type = other RNA
ttgatagtccagaagaacca

SEQ ID NO: 6074 - RNA, 20 nt, synthetic construct
  misc_feature 1..20: note = HBV-targeting guide sequence portion
  source 1..20: mol_type = other RNA
ttgatcttctaaattagtac

SEQ ID NO: 6075 - RNA, 20 nt, synthetic construct
  misc_feature 1..20: note = HBV-targeting guide sequence portion
  source 1..20: mol_type = other RNA
ttgatgatcctggaattaga

SEQ ID NO: 6076 - RNA, 20 nt, synthetic construct
  misc_feature 1..20: note = HBV-targeting guide sequence portion
  source 1..20: mol_type = other RNA
ttgattatgcctgctaggtt

SEQ ID NO: 6077 - RNA, 20 nt, synthetic construct
  misc_feature 1..20: note = HBV-targeting guide sequence portion
  source 1..20: mol_type = other RNA
ttgattggaaagtgtgtcaa

SEQ ID NO: 6078 - RNA, 20 nt, synthetic construct
  misc_feature 1..20: note = HBV-targeting guide sequence portion
  source 1..20: mol_type = other RNA
ttgattgttggggatcattg

SEQ ID NO: 6079 - RNA, 20 nt, synthetic construct
  misc_feature 1..20: note = HBV-targeting guide sequence portion
  source 1..20: mol_type = other RNA
ttgattttgtgtatgatgtg

SEQ ID NO: 6080 - RNA, 20 nt, synthetic construct
  misc_feature 1..20: note = HBV-targeting guide sequence portion
  source 1..20: mol_type = other RNA
ttgcagagagtccaagagtc

SEQ ID NO: 6081 - RNA, 20 nt, synthetic construct
  misc_feature 1..20: note = HBV-targeting guide sequence portion
  source 1..20: mol_type = other RNA
ttgcagagtttggtggaagg

SEQ ID NO: 6082 - RNA, 20 nt, synthetic construct
  misc_feature 1..20: note = HBV-targeting guide sequence portion
  source 1..20: mol_type = other RNA
ttgcatcagcaaacacttgg

SEQ ID NO: 6083 - RNA, 20 nt, synthetic construct
  misc_feature 1..20: note = HBV-targeting guide sequence portion
  source 1..20: mol_type = other RNA
ttgcatggtgctggtgcgca

SEQ ID NO: 6084 - RNA, 20 nt, synthetic construct
  misc_feature 1..20: note = HBV-targeting guide sequence portion
  source 1..20: mol_type = other RNA
ttgcattatgccctgagcct

SEQ ID NO: 6085 - RNA, 20 nt, synthetic construct
  misc_feature 1..20: note = HBV-targeting guide sequence portion
  source 1..20: mol_type = other RNA
ttgccacaaaatcacatcat

SEQ ID NO: 6086 - RNA, 20 nt, synthetic construct
  misc_feature 1..20: note = HBV-targeting guide sequence portion
  source 1..20: mol_type = other RNA
ttgccagcaaatccgcctcc

SEQ ID NO: 6087 - RNA, 20 nt, synthetic construct
  misc_feature 1..20: note = HBV-targeting guide sequence portion
  source 1..20: mol_type = other RNA
ttgccaggcaacggccaggt

SEQ ID NO: 6088 - RNA, 20 nt, synthetic construct
  misc_feature 1..20: note = HBV-targeting guide sequence portion
  source 1..20: mol_type = other RNA
ttgcccaaggtcttacataa

SEQ ID NO: 6089 - RNA, 20 nt, synthetic construct
  misc_feature 1..20: note = HBV-targeting guide sequence portion
  source 1..20: mol_type = other RNA
ttgcccttggataagggtat

SEQ ID NO: 6090 - RNA, 20 nt, synthetic construct
  misc_feature 1..20: note = HBV-targeting guide sequence portion
  source 1..20: mol_type = other RNA
ttgcctgagtgcagtatggt

SEQ ID NO: 6091 - RNA, 20 nt, synthetic construct
  misc_feature 1..20: note = HBV-targeting guide sequence portion
  source 1..20: mol_type = other RNA
ttgcctggcaacggggtaaa

SEQ ID NO: 6092 - RNA, 20 nt, synthetic construct
  misc_feature 1..20: note = HBV-targeting guide sequence portion
  source 1..20: mol_type = other RNA
ttgccttctgacttctttcc

SEQ ID NO: 6093 - RNA, 20 nt, synthetic construct
  misc_feature 1..20: note = HBV-targeting guide sequence portion
  source 1..20: mol_type = other RNA
ttgcgggagaggacaacaga

SEQ ID NO: 6094 - RNA, 20 nt, synthetic construct
  misc_feature 1..20: note = HBV-targeting guide sequence portion
  source 1..20: mol_type = other RNA
ttgctccagaccggctgcga

SEQ ID NO: 6095 - RNA, 20 nt, synthetic construct
  misc_feature 1..20: note = HBV-targeting guide sequence portion
  source 1..20: mol_type = other RNA
ttgctcgcagccggtctgga

SEQ ID NO: 6096 - RNA, 20 nt, synthetic construct
  misc_feature 1..20: note = HBV-targeting guide sequence portion
  source 1..20: mol_type = other RNA
ttgctctgaaggctgggtcc

SEQ ID NO: 6097 - RNA, 20 nt, synthetic construct
  misc_feature 1..20: note = HBV-targeting guide sequence portion
  source 1..20: mol_type = other RNA
ttgctgatgcaacccccact

SEQ ID NO: 6098 - RNA, 20 nt, synthetic construct
  misc_feature 1..20: note = HBV-targeting guide sequence portion
  source 1..20: mol_type = other RNA
ttgctgccccttttacacaa

SEQ ID NO: 6099 - RNA, 20 nt, synthetic construct
  misc_feature 1..20: note = HBV-targeting guide sequence portion
  source 1..20: mol_type = other RNA
ttgctggcaaggtttgcatt

SEQ ID NO: 6100 - RNA, 20 nt, synthetic construct
  misc_feature 1..20: note = HBV-targeting guide sequence portion
  source 1..20: mol_type = other RNA
ttgctggggagaactaatga

SEQ ID NO: 6101 - RNA, 20 nt, synthetic construct
  misc_feature 1..20: note = HBV-targeting guide sequence portion
  source 1..20: mol_type = other RNA
ttgctggtggaaagattctg

SEQ ID NO: 6102 - RNA, 20 nt, synthetic construct
  misc_feature 1..20: note = HBV-targeting guide sequence portion
  source 1..20: mol_type = other RNA
ttgctgtacaaaaccttcgg

SEQ ID NO: 6103 - RNA, 20 nt, synthetic construct
  misc_feature 1..20: note = HBV-targeting guide sequence portion
  source 1..20: mol_type = other RNA
ttgcttgcctgagtgcagta

SEQ ID NO: 6104 - RNA, 20 nt, synthetic construct
  misc_feature 1..20: note = HBV-targeting guide sequence portion
  source 1..20: mol_type = other RNA
ttggaaaacaccctcttttc

SEQ ID NO: 6105 - RNA, 20 nt, synthetic construct
  misc_feature 1..20: note = HBV-targeting guide sequence portion
  source 1..20: mol_type = other RNA
ttggaaagtgtgtcaacgaa

SEQ ID NO: 6106 - RNA, 20 nt, synthetic construct
  misc_feature 1..20: note = HBV-targeting guide sequence portion
  source 1..20: mol_type = other RNA
ttggaagagaaacggtccta

SEQ ID NO: 6107 - RNA, 20 nt, synthetic construct
  misc_feature 1..20: note = HBV-targeting guide sequence portion
  source 1..20: mol_type = other RNA
ttggaagtaatgattaacta

SEQ ID NO: 6108 - RNA, 20 nt, synthetic construct
  misc_feature 1..20: note = HBV-targeting guide sequence portion
  source 1..20: mol_type = other RNA
ttggacccagccttcagagc

SEQ ID NO: 6109 - RNA, 20 nt, synthetic construct
  misc_feature 1..20: note = HBV-targeting guide sequence portion
  source 1..20: mol_type = other RNA
ttggactcataaggtgggaa

SEQ ID NO: 6110 - RNA, 20 nt, synthetic construct
  misc_feature 1..20: note = HBV-targeting guide sequence portion
  source 1..20: mol_type = other RNA
ttggactctctgcaatgtca

SEQ ID NO: 6111 - RNA, 20 nt, synthetic construct
  misc_feature 1..20: note = HBV-targeting guide sequence portion
  source 1..20: mol_type = other RNA
ttggagctactgtggagtta

SEQ ID NO: 6112 - RNA, 20 nt, synthetic construct
  misc_feature 1..20: note = HBV-targeting guide sequence portion
  source 1..20: mol_type = other RNA
ttggaggacaggaggttggt

SEQ ID NO: 6113 - RNA, 20 nt, synthetic construct
  misc_feature 1..20: note = HBV-targeting guide sequence portion
  source 1..20: mol_type = other RNA
ttggaggcttgaacagtagg

SEQ ID NO: 6114 - RNA, 20 nt, synthetic construct
  misc_feature 1..20: note = HBV-targeting guide sequence portion
  source 1..20: mol_type = other RNA
ttggaggttggggactgcga

SEQ ID NO: 6115 - RNA, 20 nt, synthetic construct
  misc_feature 1..20: note = HBV-targeting guide sequence portion
  source 1..20: mol_type = other RNA
ttggagtctcctgagcattg

SEQ ID NO: 6116 - RNA, 20 nt, synthetic construct
  misc_feature 1..20: note = HBV-targeting guide sequence portion
  source 1..20: mol_type = other RNA
ttggagtgtggattcgcact

SEQ ID NO: 6117 - RNA, 20 nt, synthetic construct
  misc_feature 1..20: note = HBV-targeting guide sequence portion
  source 1..20: mol_type = other RNA
ttggagtttgctctgaaggc

SEQ ID NO: 6118 - RNA, 20 nt, synthetic construct
  misc_feature 1..20: note = HBV-targeting guide sequence portion
  source 1..20: mol_type = other RNA
ttggataagggtattaaacc

SEQ ID NO: 6119 - RNA, 20 nt, synthetic construct
  misc_feature 1..20: note = HBV-targeting guide sequence portion
  source 1..20: mol_type = other RNA
ttggcacagacctggccgtt

SEQ ID NO: 6120 - RNA, 20 nt, synthetic construct
  misc_feature 1..20: note = HBV-targeting guide sequence portion
  source 1..20: mol_type = other RNA
ttggcagcacagcctagcag

SEQ ID NO: 6121 - RNA, 20 nt, synthetic construct
  misc_feature 1..20: note = HBV-targeting guide sequence portion
  source 1..20: mol_type = other RNA
ttggccaaaattcgcagtcc

SEQ ID NO: 6122 - RNA, 20 nt, synthetic construct
  misc_feature 1..20: note = HBV-targeting guide sequence portion
  source 1..20: mol_type = other RNA
ttggccaagacacacggtag

SEQ ID NO: 6123 - RNA, 20 nt, synthetic construct
  misc_feature 1..20: note = HBV-targeting guide sequence portion
  source 1..20: mol_type = other RNA
ttggcccccaataccacatc

SEQ ID NO: 6124 - RNA, 20 nt, synthetic construct
  misc_feature 1..20: note = HBV-targeting guide sequence portion
  source 1..20: mol_type = other RNA
ttggcgaaaaagtgaaagcc

SEQ ID NO: 6125 - RNA, 20 nt, synthetic construct
  misc_feature 1..20: note = HBV-targeting guide sequence portion
  source 1..20: mol_type = other RNA
ttggcgtctggccagggatc

SEQ ID NO: 6126 - RNA, 20 nt, synthetic construct
  misc_feature 1..20: note = HBV-targeting guide sequence portion
  source 1..20: mol_type = other RNA
ttggctcagtttactagtgc

SEQ ID NO: 6127 - RNA, 20 nt, synthetic construct
  misc_feature 1..20: note = HBV-targeting guide sequence portion
  source 1..20: mol_type = other RNA
ttggctttcagttatatgga

SEQ ID NO: 6128 - RNA, 20 nt, synthetic construct
  misc_feature 1..20: note = HBV-targeting guide sequence portion
  source 1..20: mol_type = other RNA
ttgggaacaagagctacagc

SEQ ID NO: 6129 - RNA, 20 nt, synthetic construct
  misc_feature 1..20: note = HBV-targeting guide sequence portion
  source 1..20: mol_type = other RNA
ttgggacttcaatcccaaca

SEQ ID NO: 6130 - RNA, 20 nt, synthetic construct
  misc_feature 1..20: note = HBV-targeting guide sequence portion
  source 1..20: mol_type = other RNA
ttgggattgaagtcccaatc

SEQ ID NO: 6131 - RNA, 20 nt, synthetic construct
  misc_feature 1..20: note = HBV-targeting guide sequence portion
  source 1..20: mol_type = other RNA
ttgggcaagaattggtgggc

SEQ ID NO: 6132 - RNA, 20 nt, synthetic construct
  misc_feature 1..20: note = HBV-targeting guide sequence portion
  source 1..20: mol_type = other RNA
ttggggaccctgcgctgaac

SEQ ID NO: 6133 - RNA, 20 nt, synthetic construct
  misc_feature 1..20: note = HBV-targeting guide sequence portion
  source 1..20: mol_type = other RNA
ttggggactgcgaattttgg

SEQ ID NO: 6134 - RNA, 20 nt, synthetic construct
  misc_feature 1..20: note = HBV-targeting guide sequence portion
  source 1..20: mol_type = other RNA
ttggggatcattgccacaaa

SEQ ID NO: 6135 - RNA, 20 nt, synthetic construct
  misc_feature 1..20: note = HBV-targeting guide sequence portion
  source 1..20: mol_type = other RNA
ttggggccctgtcgtcctct

SEQ ID NO: 6136 - RNA, 20 nt, synthetic construct
  misc_feature 1..20: note = HBV-targeting guide sequence portion
  source 1..20: mol_type = other RNA
ttggggcttggtcataggcc

SEQ ID NO: 6137 - RNA, 20 nt, synthetic construct
  misc_feature 1..20: note = HBV-targeting guide sequence portion
  source 1..20: mol_type = other RNA
ttgggggaggagattagatt

SEQ ID NO: 6138 - RNA, 20 nt, synthetic construct
  misc_feature 1..20: note = HBV-targeting guide sequence portion
  source 1..20: mol_type = other RNA
ttgggggccaagtctgtaca

SEQ ID NO: 6139 - RNA, 20 nt, synthetic construct
  misc_feature 1..20: note = HBV-targeting guide sequence portion
  source 1..20: mol_type = other RNA
ttggggtggagccctcaggc

SEQ ID NO: 6140 - RNA, 20 nt, synthetic construct
  misc_feature 1..20: note = HBV-targeting guide sequence portion
  source 1..20: mol_type = other RNA
ttgggtggctttagggcatg

SEQ ID NO: 6141 - RNA, 20 nt, synthetic construct
  misc_feature 1..20: note = HBV-targeting guide sequence portion
  source 1..20: mol_type = other RNA
ttgggtgtacatttaaaccc

SEQ ID NO: 6142 - RNA, 20 nt, synthetic construct
  misc_feature 1..20: note = HBV-targeting guide sequence portion
  source 1..20: mol_type = other RNA
ttggtaacagcggtataaag

SEQ ID NO: 6143 - RNA, 20 nt, synthetic construct
  misc_feature 1..20: note = HBV-targeting guide sequence portion
  source 1..20: mol_type = other RNA
ttggtagaggcaggaggcgg

SEQ ID NO: 6144 - RNA, 20 nt, synthetic construct
  misc_feature 1..20: note = HBV-targeting guide sequence portion
  source 1..20: mol_type = other RNA
ttggtcataggccatcagcg

SEQ ID NO: 6145 - RNA, 20 nt, synthetic construct
  misc_feature 1..20: note = HBV-targeting guide sequence portion
  source 1..20: mol_type = other RNA
ttggtctgcgcaccagcacc

SEQ ID NO: 6146 - RNA, 20 nt, synthetic construct
  misc_feature 1..20: note = HBV-targeting guide sequence portion
  source 1..20: mol_type = other RNA
ttggtgaatttaggataaaa

SEQ ID NO: 6147 - RNA, 20 nt, synthetic construct
  misc_feature 1..20: note = HBV-targeting guide sequence portion
  source 1..20: mol_type = other RNA
ttggtgagtgattggaggtt

SEQ ID NO: 6148 - RNA, 20 nt, synthetic construct
  misc_feature 1..20: note = HBV-targeting guide sequence portion
  source 1..20: mol_type = other RNA
ttggtgggcgttcacggtgg

SEQ ID NO: 6149 - RNA, 20 nt, synthetic construct
  misc_feature 1..20: note = HBV-targeting guide sequence portion
  source 1..20: mol_type = other RNA
ttggtggtctataagctgga

SEQ ID NO: 6150 - RNA, 20 nt, synthetic construct
  misc_feature 1..20: note = HBV-targeting guide sequence portion
  source 1..20: mol_type = other RNA
ttggtgtagatgtatattag

SEQ ID NO: 6151 - RNA, 20 nt, synthetic construct
  misc_feature 1..20: note = HBV-targeting guide sequence portion
  source 1..20: mol_type = other RNA
ttggtgtcttttggagtgtg

SEQ ID NO: 6152 - RNA, 20 nt, synthetic construct
  misc_feature 1..20: note = HBV-targeting guide sequence portion
  source 1..20: mol_type = other RNA
ttggttcttctggactatca

SEQ ID NO: 6153 - RNA, 20 nt, synthetic construct
  misc_feature 1..20: note = HBV-targeting guide sequence portion
  source 1..20: mol_type = other RNA
ttgtaagttggcgaaaaagt

SEQ ID NO: 6154 - RNA, 20 nt, synthetic construct
  misc_feature 1..20: note = HBV-targeting guide sequence portion
  source 1..20: mol_type = other RNA
ttgtacagcaacaggaggga

SEQ ID NO: 6155 - RNA, 20 nt, synthetic construct
  misc_feature 1..20: note = HBV-targeting guide sequence portion
  source 1..20: mol_type = other RNA
ttgtactaggaggctgtagg

SEQ ID NO: 6156 - RNA, 20 nt, synthetic construct
  misc_feature 1..20: note = HBV-targeting guide sequence portion
  source 1..20: mol_type = other RNA
ttgtaggcccgcttacagtt

SEQ ID NO: 6157 - RNA, 20 nt, synthetic construct
  misc_feature 1..20: note = HBV-targeting guide sequence portion
  source 1..20: mol_type = other RNA
ttgtatgcatgtattcaatc

SEQ ID NO: 6158 - RNA, 20 nt, synthetic construct
  misc_feature 1..20: note = HBV-targeting guide sequence portion
  source 1..20: mol_type = other RNA
ttgtcaacaaggaaaacccc

SEQ ID NO: 6159 - RNA, 20 nt, synthetic construct
  misc_feature 1..20: note = HBV-targeting guide sequence portion
  source 1..20: mol_type = other RNA
ttgtcagtcccgagaatgtt

SEQ ID NO: 6160 - RNA, 20 nt, synthetic construct
  misc_feature 1..20: note = HBV-targeting guide sequence portion
  source 1..20: mol_type = other RNA
ttgtcctctcccgcaaatat

SEQ ID NO: 6161 - RNA, 20 nt, synthetic construct
  misc_feature 1..20: note = HBV-targeting guide sequence portion
  source 1..20: mol_type = other RNA
ttgtcctggttatcgctgga

SEQ ID NO: 6162 - RNA, 20 nt, synthetic construct
  misc_feature 1..20: note = HBV-targeting guide sequence portion
  source 1..20: mol_type = other RNA
ttgtctgaactttaggccca

SEQ ID NO: 6163 - RNA, 20 nt, synthetic construct
  misc_feature 1..20: note = HBV-targeting guide sequence portion
  source 1..20: mol_type = other RNA
ttgtcttacttttggaagag

SEQ ID NO: 6164 - RNA, 20 nt, synthetic construct
  misc_feature 1..20: note = HBV-targeting guide sequence portion
  source 1..20: mol_type = other RNA
ttgtctttgggtgtacattt

SEQ ID NO: 6165 - RNA, 20 nt, synthetic construct
  misc_feature 1..20: note = HBV-targeting guide sequence portion
  source 1..20: mol_type = other RNA
ttgtgaggattcttgtcaac

SEQ ID NO: 6166 - RNA, 20 nt, synthetic construct
  misc_feature 1..20: note = HBV-targeting guide sequence portion
  source 1..20: mol_type = other RNA
ttgtggcaatgatccccaac

SEQ ID NO: 6167 - RNA, 20 nt, synthetic construct
  misc_feature 1..20: note = HBV-targeting guide sequence portion
  source 1..20: mol_type = other RNA
ttgtgggtcttctgggtttt

SEQ ID NO: 6168 - RNA, 20 nt, synthetic construct
  misc_feature 1..20: note = HBV-targeting guide sequence portion
  source 1..20: mol_type = other RNA
ttgtggtttcacatttcttg

SEQ ID NO: 6169 - RNA, 20 nt, synthetic construct
  misc_feature 1..20: note = HBV-targeting guide sequence portion
  source 1..20: mol_type = other RNA
ttgtgtaaaaggggcagcaa

SEQ ID NO: 6170 - RNA, 20 nt, synthetic construct
  misc_feature 1..20: note = HBV-targeting guide sequence portion
  source 1..20: mol_type = other RNA
ttgtgtatgatgtgattttg

SEQ ID NO: 6171 - RNA, 20 nt, synthetic construct
  misc_feature 1..20: note = HBV-targeting guide sequence portion
  source 1..20: mol_type = other RNA
ttgtgttgttagacgacgag

SEQ ID NO: 6172 - RNA, 20 nt, synthetic construct
  misc_feature 1..20: note = HBV-targeting guide sequence portion
  source 1..20: mol_type = other RNA
ttgttagacgacgaggcagg

SEQ ID NO: 6173 - RNA, 20 nt, synthetic construct
  misc_feature 1..20: note = HBV-targeting guide sequence portion
  source 1..20: mol_type = other RNA
ttgttagggtttaaatgtac

SEQ ID NO: 6174 - RNA, 20 nt, synthetic construct
  misc_feature 1..20: note = HBV-targeting guide sequence portion
  source 1..20: mol_type = other RNA
ttgttcacctcaccatactg

SEQ ID NO: 6175 - RNA, 20 nt, synthetic construct
  misc_feature 1..20: note = HBV-targeting guide sequence portion
  source 1..20: mol_type = other RNA
ttgttcagtggttcgtaggg

SEQ ID NO: 6176 - RNA, 20 nt, synthetic construct
  misc_feature 1..20: note = HBV-targeting guide sequence portion
  source 1..20: mol_type = other RNA
ttgttcatgtcctactgttc

SEQ ID NO: 6177 - RNA, 20 nt, synthetic construct
  misc_feature 1..20: note = HBV-targeting guide sequence portion
  source 1..20: mol_type = other RNA
ttgttcccaagaatatggtg

SEQ ID NO: 6178 - RNA, 20 nt, synthetic construct
  misc_feature 1..20: note = HBV-targeting guide sequence portion
  source 1..20: mol_type = other RNA
ttgttgacaagaatcctcac

SEQ ID NO: 6179 - RNA, 20 nt, synthetic construct
  misc_feature 1..20: note = HBV-targeting guide sequence portion
  source 1..20: mol_type = other RNA
ttgttggagtttgctctgaa

SEQ ID NO: 6180 - RNA, 20 nt, synthetic construct
  misc_feature 1..20: note = HBV-targeting guide sequence portion
  source 1..20: mol_type = other RNA
ttgttggcgtctggccaggg

SEQ ID NO: 6181 - RNA, 20 nt, synthetic construct
  misc_feature 1..20: note = HBV-targeting guide sequence portion
  source 1..20: mol_type = other RNA
ttgttgggattgaagtccca

SEQ ID NO: 6182 - RNA, 20 nt, synthetic construct
  misc_feature 1..20: note = HBV-targeting guide sequence portion
  source 1..20: mol_type = other RNA
ttgttggggatcattgccac

SEQ ID NO: 6183 - RNA, 20 nt, synthetic construct
  misc_feature 1..20: note = HBV-targeting guide sequence portion
  source 1..20: mol_type = other RNA
ttgttggttcttctggacta

SEQ ID NO: 6184 - RNA, 20 nt, synthetic construct
  misc_feature 1..20: note = HBV-targeting guide sequence portion
  source 1..20: mol_type = other RNA
ttgtttaaagactgggagga

SEQ ID NO: 6185 - RNA, 20 nt, synthetic construct
  misc_feature 1..20: note = HBV-targeting guide sequence portion
  source 1..20: mol_type = other RNA
ttgtttacacagaaaggcct

SEQ ID NO: 6186 - RNA, 20 nt, synthetic construct
  misc_feature 1..20: note = HBV-targeting guide sequence portion
  source 1..20: mol_type = other RNA
ttgtttacgtcccgtcggcg

SEQ ID NO: 6187 - RNA, 20 nt, synthetic construct
  misc_feature 1..20: note = HBV-targeting guide sequence portion
  source 1..20: mol_type = other RNA
ttgttttgctcgcagccggt

SEQ ID NO: 6188 - RNA, 20 nt, synthetic construct
  misc_feature 1..20: note = HBV-targeting guide sequence portion
  source 1..20: mol_type = other RNA
ttgttttgttagggtttaaa

SEQ ID NO: 6189 - RNA, 20 nt, synthetic construct
  misc_feature 1..20: note = HBV-targeting guide sequence portion
  source 1..20: mol_type = other RNA
tttaaacaaacagtctttga

SEQ ID NO: 6190 - RNA, 20 nt, synthetic construct
  misc_feature 1..20: note = HBV-targeting guide sequence portion
  source 1..20: mol_type = other RNA
tttaaaccctaacaaaacaa

SEQ ID NO: 6191 - RNA, 20 nt, synthetic construct
  misc_feature 1..20: note = HBV-targeting guide sequence portion
  source 1..20: mol_type = other RNA
tttaaagactgggaggagtt

SEQ ID NO: 6192 - RNA, 20 nt, synthetic construct
  misc_feature 1..20: note = HBV-targeting guide sequence portion
  source 1..20: mol_type = other RNA
tttaaatgtacacccaaaga

SEQ ID NO: 6193 - RNA, 20 nt, synthetic construct
  misc_feature 1..20: note = HBV-targeting guide sequence portion
  source 1..20: mol_type = other RNA
tttaaccctcattggaaaac

SEQ ID NO: 6194 - RNA, 20 nt, synthetic construct
  misc_feature 1..20: note = HBV-targeting guide sequence portion
  source 1..20: mol_type = other RNA
tttaatacccttatccaagg

SEQ ID NO: 6195 - RNA, 20 nt, synthetic construct
  misc_feature 1..20: note = HBV-targeting guide sequence portion
  source 1..20: mol_type = other RNA
tttaatgcccttgtatgcat

SEQ ID NO: 6196 - RNA, 20 nt, synthetic construct
  misc_feature 1..20: note = HBV-targeting guide sequence portion
  source 1..20: mol_type = other RNA
tttacacaatgtggttatcc

SEQ ID NO: 6197 - RNA, 20 nt, synthetic construct
  misc_feature 1..20: note = HBV-targeting guide sequence portion
  source 1..20: mol_type = other RNA
tttacacactctatggaagg

SEQ ID NO: 6198 - RNA, 20 nt, synthetic construct
  misc_feature 1..20: note = HBV-targeting guide sequence portion
  source 1..20: mol_type = other RNA
tttacacagaaaggccttgt

SEQ ID NO: 6199 - RNA, 20 nt, synthetic construct
  misc_feature 1..20: note = HBV-targeting guide sequence portion
  source 1..20: mol_type = other RNA
tttaccccgttgccaggcaa

SEQ ID NO: 6200 - RNA, 20 nt, synthetic construct
  misc_feature 1..20: note = HBV-targeting guide sequence portion
  source 1..20: mol_type = other RNA
tttacgcggactccccgtct

SEQ ID NO: 6201 - RNA, 20 nt, synthetic construct
  misc_feature 1..20: note = HBV-targeting guide sequence portion
  source 1..20: mol_type = other RNA
tttacggggctttattcttc

SEQ ID NO: 6202 - RNA, 20 nt, synthetic construct
  misc_feature 1..20: note = HBV-targeting guide sequence portion
  source 1..20: mol_type = other RNA
tttacgtcccgtcggcgctg

SEQ ID NO: 6203 - RNA, 20 nt, synthetic construct
  misc_feature 1..20: note = HBV-targeting guide sequence portion
  source 1..20: mol_type = other RNA
tttactagtgccatttgttc

SEQ ID NO: 6204 - RNA, 20 nt, synthetic construct
  misc_feature 1..20: note = HBV-targeting guide sequence portion
  source 1..20: mol_type = other RNA
tttactgttcctgaactgga

SEQ ID NO: 6205 - RNA, 20 nt, synthetic construct
  misc_feature 1..20: note = HBV-targeting guide sequence portion
  source 1..20: mol_type = other RNA
tttagaagatcaagcatcta

SEQ ID NO: 6206 - RNA, 20 nt, synthetic construct
  misc_feature 1..20: note = HBV-targeting guide sequence portion
  source 1..20: mol_type = other RNA
tttaggataaaacctagcag

SEQ ID NO: 6207 - RNA, 20 nt, synthetic construct
  misc_feature 1..20: note = HBV-targeting guide sequence portion
  source 1..20: mol_type = other RNA
tttaggcccatatgagtgtt

SEQ ID NO: 6208 - RNA, 20 nt, synthetic construct
  misc_feature 1..20: note = HBV-targeting guide sequence portion
  source 1..20: mol_type = other RNA
tttagggcatggacattgac

SEQ ID NO: 6209 - RNA, 20 nt, synthetic construct
  misc_feature 1..20: note = HBV-targeting guide sequence portion
  source 1..20: mol_type = other RNA
tttataccgctgttaccaat

SEQ ID NO: 6210 - RNA, 20 nt, synthetic construct
  misc_feature 1..20: note = HBV-targeting guide sequence portion
  source 1..20: mol_type = other RNA
tttatataagagagtgtcaa

SEQ ID NO: 6211 - RNA, 20 nt, synthetic construct
  misc_feature 1..20: note = HBV-targeting guide sequence portion
  source 1..20: mol_type = other RNA
tttatatgggtcaatgtcca

SEQ ID NO: 6212 - RNA, 20 nt, synthetic construct
  misc_feature 1..20: note = HBV-targeting guide sequence portion
  source 1..20: mol_type = other RNA
tttatcatcttcctcttcat

SEQ ID NO: 6213 - RNA, 20 nt, synthetic construct
  misc_feature 1..20: note = HBV-targeting guide sequence portion
  source 1..20: mol_type = other RNA
tttatcctaaattcaccaaa

SEQ ID NO: 6214 - RNA, 20 nt, synthetic construct
  misc_feature 1..20: note = HBV-targeting guide sequence portion
  source 1..20: mol_type = other RNA
tttatgcctacagcctccta

SEQ ID NO: 6215 - RNA, 20 nt, synthetic construct
  misc_feature 1..20: note = HBV-targeting guide sequence portion
  source 1..20: mol_type = other RNA
tttattcttctactgtacct

SEQ ID NO: 6216 - RNA, 20 nt, synthetic construct
  misc_feature 1..20: note = HBV-targeting guide sequence portion
  source 1..20: mol_type = other RNA
tttcaaccgtcttttctcat

SEQ ID NO: 6217 - RNA, 20 nt, synthetic construct
  misc_feature 1..20: note = HBV-targeting guide sequence portion
  source 1..20: mol_type = other RNA
tttcacatttcttgtcttac

SEQ ID NO: 6218 - RNA, 20 nt, synthetic construct
  misc_feature 1..20: note = HBV-targeting guide sequence portion
  source 1..20: mol_type = other RNA
tttcacctctgcctaatcat

SEQ ID NO: 6219 - RNA, 20 nt, synthetic construct
  misc_feature 1..20: note = HBV-targeting guide sequence portion
  source 1..20: mol_type = other RNA
tttcactttttcgccaactt

SEQ ID NO: 6220 - RNA, 20 nt, synthetic construct
  misc_feature 1..20: note = HBV-targeting guide sequence portion
  source 1..20: mol_type = other RNA
tttcagaaaactcccggtta

SEQ ID NO: 6221 - RNA, 20 nt, synthetic construct
  misc_feature 1..20: note = HBV-targeting guide sequence portion
  source 1..20: mol_type = other RNA
tttcagttatatggatgatg

SEQ ID NO: 6222 - RNA, 20 nt, synthetic construct
  misc_feature 1..20: note = HBV-targeting guide sequence portion
  source 1..20: mol_type = other RNA
tttcatgggctatgtcattg

SEQ ID NO: 6223 - RNA, 20 nt, synthetic construct
  misc_feature 1..20: note = HBV-targeting guide sequence portion
  source 1..20: mol_type = other RNA
tttccaatcaataggcctgt

SEQ ID NO: 6224 - RNA, 20 nt, synthetic construct
  misc_feature 1..20: note = HBV-targeting guide sequence portion
  source 1..20: mol_type = other RNA
tttccaatgagggttaaaga

SEQ ID NO: 6225 - RNA, 20 nt, synthetic construct
  misc_feature 1..20: note = HBV-targeting guide sequence portion
  source 1..20: mol_type = other RNA
tttccaccagcaatcctctg

SEQ ID NO: 6226 - RNA, 20 nt, synthetic construct
  misc_feature 1..20: note = HBV-targeting guide sequence portion
  source 1..20: mol_type = other RNA
tttccatccgaaggttttgt

SEQ ID NO: 6227 - RNA, 20 nt, synthetic construct
  misc_feature 1..20: note = HBV-targeting guide sequence portion
  source 1..20: mol_type = other RNA
tttcccaccttatgagtcca

SEQ ID NO: 6228 - RNA, 20 nt, synthetic construct
  misc_feature 1..20: note = HBV-targeting guide sequence portion
  source 1..20: mol_type = other RNA
tttcccccactgtttggctt

SEQ ID NO: 6229 - RNA, 20 nt, synthetic construct
  misc_feature 1..20: note = HBV-targeting guide sequence portion
  source 1..20: mol_type = other RNA
tttcccgaccaccagttgga

SEQ ID NO: 6230 - RNA, 20 nt, synthetic construct
  misc_feature 1..20: note = HBV-targeting guide sequence portion
  source 1..20: mol_type = other RNA
tttcccgtctgtcctctaat

SEQ ID NO: 6231 - RNA, 20 nt, synthetic construct
  misc_feature 1..20: note = HBV-targeting guide sequence portion
  source 1..20: mol_type = other RNA
tttccgaaagcccaggatga

SEQ ID NO: 6232 - RNA, 20 nt, synthetic construct
  misc_feature 1..20: note = HBV-targeting guide sequence portion
  source 1..20: mol_type = other RNA
tttccggctcctctgccgat

SEQ ID NO: 6233 - RNA, 20 nt, synthetic construct
  misc_feature 1..20: note = HBV-targeting guide sequence portion
  source 1..20: mol_type = other RNA
tttcctaatatacatctaca

SEQ ID NO: 6234 - RNA, 20 nt, synthetic construct
  misc_feature 1..20: note = HBV-targeting guide sequence portion
  source 1..20: mol_type = other RNA
tttccttccgtacgagatct

SEQ ID NO: 6235 - RNA, 20 nt, synthetic construct
  misc_feature 1..20: note = HBV-targeting guide sequence portion
  source 1..20: mol_type = other RNA
tttccttgttgacaagaatc

SEQ ID NO: 6236 - RNA, 20 nt, synthetic construct
  misc_feature 1..20: note = HBV-targeting guide sequence portion
  source 1..20: mol_type = other RNA
tttcgccaacttacaaggcc

SEQ ID NO: 6237 - RNA, 20 nt, synthetic construct
  misc_feature 1..20: note = HBV-targeting guide sequence portion
  source 1..20: mol_type = other RNA
tttcggaaaattcctatggg

SEQ ID NO: 6238 - RNA, 20 nt, synthetic construct
  misc_feature 1..20: note = HBV-targeting guide sequence portion
  source 1..20: mol_type = other RNA
tttctagggggaactaccgt

SEQ ID NO: 6239 - RNA, 20 nt, synthetic construct
  misc_feature 1..20: note = HBV-targeting guide sequence portion
  source 1..20: mol_type = other RNA
tttctcagaggtggagacag

SEQ ID NO: 6240 - RNA, 20 nt, synthetic construct
  misc_feature 1..20: note = HBV-targeting guide sequence portion
  source 1..20: mol_type = other RNA
tttctcattaactgtaagcg

SEQ ID NO: 6241 - RNA, 20 nt, synthetic construct
  misc_feature 1..20: note = HBV-targeting guide sequence portion
  source 1..20: mol_type = other RNA
tttctcttccaaaagtaaga

SEQ ID NO: 6242 - RNA, 20 nt, synthetic construct
  misc_feature 1..20: note = HBV-targeting guide sequence portion
  source 1..20: mol_type = other RNA
tttctcttggctcagtttac

SEQ ID NO: 6243 - RNA, 20 nt, synthetic construct
  misc_feature 1..20: note = HBV-targeting guide sequence portion
  source 1..20: mol_type = other RNA
tttctgaaacattctttgat

SEQ ID NO: 6244 - RNA, 20 nt, synthetic construct
  misc_feature 1..20: note = HBV-targeting guide sequence portion
  source 1..20: mol_type = other RNA
tttctgtgtaaacaatacct

SEQ ID NO: 6245 - RNA, 20 nt, synthetic construct
  misc_feature 1..20: note = HBV-targeting guide sequence portion
  source 1..20: mol_type = other RNA
tttcttgtcttacttttgga

SEQ ID NO: 6246 - RNA, 20 nt, synthetic construct
  misc_feature 1..20: note = HBV-targeting guide sequence portion
  source 1..20: mol_type = other RNA
tttcttttgtctttgggtgt

SEQ ID NO: 6247 - RNA, 20 nt, synthetic construct
  misc_feature 1..20: note = HBV-targeting guide sequence portion
  source 1..20: mol_type = other RNA
tttgaagtatgcctcaaggt

SEQ ID NO: 6248 - RNA, 20 nt, synthetic construct
  misc_feature 1..20: note = HBV-targeting guide sequence portion
  source 1..20: mol_type = other RNA
tttgataatatcttggtgta

SEQ ID NO: 6249 - RNA, 20 nt, synthetic construct
  misc_feature 1..20: note = HBV-targeting guide sequence portion
  source 1..20: mol_type = other RNA
tttgattttgtgtatgatgt

SEQ ID NO: 6250 - RNA, 20 nt, synthetic construct
  misc_feature 1..20: note = HBV-targeting guide sequence portion
  source 1..20: mol_type = other RNA
tttgcattatgccctgagcc

SEQ ID NO: 6251 - RNA, 20 nt, synthetic construct
  misc_feature 1..20: note = HBV-targeting guide sequence portion
  source 1..20: mol_type = other RNA
tttgccttctgacttctttc

SEQ ID NO: 6252 - RNA, 20 nt, synthetic construct
  misc_feature 1..20: note = HBV-targeting guide sequence portion
  source 1..20: mol_type = other RNA
tttgcgggagaggacaacag

SEQ ID NO: 6253 - RNA, 20 nt, synthetic construct
  misc_feature 1..20: note = HBV-targeting guide sequence portion
  source 1..20: mol_type = other RNA
tttgctccagaccggctgcg

SEQ ID NO: 6254 - RNA, 20 nt, synthetic construct
  misc_feature 1..20: note = HBV-targeting guide sequence portion
  source 1..20: mol_type = other RNA
tttgctcgcagccggtctgg

SEQ ID NO: 6255 - RNA, 20 nt, synthetic construct
  misc_feature 1..20: note = HBV-targeting guide sequence portion
  source 1..20: mol_type = other RNA
tttgctctgaaggctgggtc

SEQ ID NO: 6256 - RNA, 20 nt, synthetic construct
  misc_feature 1..20: note = HBV-targeting guide sequence portion
  source 1..20: mol_type = other RNA
tttgctgatgcaacccccac

SEQ ID NO: 6257 - RNA, 20 nt, synthetic construct
  misc_feature 1..20: note = HBV-targeting guide sequence portion
  source 1..20: mol_type = other RNA
tttgctgccccttttacaca

SEQ ID NO: 6258 - RNA, 20 nt, synthetic construct
  misc_feature 1..20: note = HBV-targeting guide sequence portion
  source 1..20: mol_type = other RNA
tttgctggcaaggtttgcat

SEQ ID NO: 6259 - RNA, 20 nt, synthetic construct
  misc_feature 1..20: note = HBV-targeting guide sequence portion
  source 1..20: mol_type = other RNA
tttgctggggagaactaatg

SEQ ID NO: 6260 - RNA, 20 nt, synthetic construct
  misc_feature 1..20: note = HBV-targeting guide sequence portion
  source 1..20: mol_type = other RNA
tttggaagagaaacggtcct

SEQ ID NO: 6261 - RNA, 20 nt, synthetic construct
  misc_feature 1..20: note = HBV-targeting guide sequence portion
  source 1..20: mol_type = other RNA
tttggaagtaatgattaact

SEQ ID NO: 6262 - RNA, 20 nt, synthetic construct
  misc_feature 1..20: note = HBV-targeting guide sequence portion
  source 1..20: mol_type = other RNA
tttggagctactgtggagtt

SEQ ID NO: 6263 - RNA, 20 nt, synthetic construct
  misc_feature 1..20: note = HBV-targeting guide sequence portion
  source 1..20: mol_type = other RNA
tttggagtgtggattcgcac

SEQ ID NO: 6264 - RNA, 20 nt, synthetic construct
  misc_feature 1..20: note = HBV-targeting guide sequence portion
  source 1..20: mol_type = other RNA
tttggccaagacacacggta

SEQ ID NO: 6265 - RNA, 20 nt, synthetic construct
  misc_feature 1..20: note = HBV-targeting guide sequence portion
  source 1..20: mol_type = other RNA
tttggctttcagttatatgg

SEQ ID NO: 6266 - RNA, 20 nt, synthetic construct
  misc_feature 1..20: note = HBV-targeting guide sequence portion
  source 1..20: mol_type = other RNA
tttggggtggagccctcagg

SEQ ID NO: 6267 - RNA, 20 nt, synthetic construct
  misc_feature 1..20: note = HBV-targeting guide sequence portion
  source 1..20: mol_type = other RNA
tttgggtgtacatttaaacc

SEQ ID NO: 6268 - RNA, 20 nt, synthetic construct
  misc_feature 1..20: note = HBV-targeting guide sequence portion
  source 1..20: mol_type = other RNA
tttggtgaatttaggataaa

SEQ ID NO: 6269 - RNA, 20 nt, synthetic construct
  misc_feature 1..20: note = HBV-targeting guide sequence portion
  source 1..20: mol_type = other RNA
tttggtggtctataagctgg

SEQ ID NO: 6270 - RNA, 20 nt, synthetic construct
  misc_feature 1..20: note = HBV-targeting guide sequence portion
  source 1..20: mol_type = other RNA
tttggtgtcttttggagtgt

SEQ ID NO: 6271 - RNA, 20 nt, synthetic construct
  misc_feature 1..20: note = HBV-targeting guide sequence portion
  source 1..20: mol_type = other RNA
tttgtacagcaacaggaggg

SEQ ID NO: 6272 - RNA, 20 nt, synthetic construct
  misc_feature 1..20: note = HBV-targeting guide sequence portion
  source 1..20: mol_type = other RNA
tttgtactaggaggctgtag

SEQ ID NO: 6273 - RNA, 20 nt, synthetic construct
  misc_feature 1..20: note = HBV-targeting guide sequence portion
  source 1..20: mol_type = other RNA
tttgtaggcccgcttacagt

SEQ ID NO: 6274 - RNA, 20 nt, synthetic construct
  misc_feature 1..20: note = HBV-targeting guide sequence portion
  source 1..20: mol_type = other RNA
tttgtctttgggtgtacatt

SEQ ID NO: 6275 - RNA, 20 nt, synthetic construct
  misc_feature 1..20: note = HBV-targeting guide sequence portion
  source 1..20: mol_type = other RNA
tttgtggcaatgatccccaa

SEQ ID NO: 6276 - RNA, 20 nt, synthetic construct
  misc_feature 1..20: note = HBV-targeting guide sequence portion
  source 1..20: mol_type = other RNA
tttgtgtatgatgtgatttt

SEQ ID NO: 6277 - RNA, 20 nt, synthetic construct
  misc_feature 1..20: note = HBV-targeting guide sequence portion
  source 1..20: mol_type = other RNA
tttgttagggtttaaatgta

SEQ ID NO: 6278 - RNA, 20 nt, synthetic construct
  misc_feature 1..20: note = HBV-targeting guide sequence portion
  source 1..20: mol_type = other RNA
tttgttcagtggttcgtagg

SEQ ID NO: 6279 - RNA, 20 nt, synthetic construct
  misc_feature 1..20: note = HBV-targeting guide sequence portion
  source 1..20: mol_type = other RNA
tttgtttaaagactgggagg

SEQ ID NO: 6280 - RNA, 20 nt, synthetic construct
  misc_feature 1..20: note = HBV-targeting guide sequence portion
  source 1..20: mol_type = other RNA
tttgtttacgtcccgtcggc

SEQ ID NO: 6281 - RNA, 20 nt, synthetic construct
  misc_feature 1..20: note = HBV-targeting guide sequence portion
  source 1..20: mol_type = other RNA
tttgttttgttagggtttaa

SEQ ID NO: 6282 - RNA, 20 nt, synthetic construct
  misc_feature 1..20: note = HBV-targeting guide sequence portion
  source 1..20: mol_type = other RNA
ttttacacaatgtggttatc

SEQ ID NO: 6283 - RNA, 20 nt, synthetic construct
  misc_feature 1..20: note = HBV-targeting guide sequence portion
  source 1..20: mol_type = other RNA
ttttacggggctttattctt

SEQ ID NO: 6284 - RNA, 20 nt, synthetic construct
  misc_feature 1..20: note = HBV-targeting guide sequence portion
  source 1..20: mol_type = other RNA
ttttatataagagagtgtca

SEQ ID NO: 6285 - RNA, 20 nt, synthetic construct
  misc_feature 1..20: note = HBV-targeting guide sequence portion
  source 1..20: mol_type = other RNA
ttttatcatcttcctcttca

SEQ ID NO: 6286 - RNA, 20 nt, synthetic construct
  misc_feature 1..20: note = HBV-targeting guide sequence portion
  source 1..20: mol_type = other RNA
ttttatcctaaattcaccaa

SEQ ID NO: 6287 - RNA, 20 nt, synthetic construct
  misc_feature 1..20: note = HBV-targeting guide sequence portion
  source 1..20: mol_type = other RNA
ttttcacctctgcctaatca

SEQ ID NO: 6288 - RNA, 20 nt, synthetic construct
  misc_feature 1..20: note = HBV-targeting guide sequence portion
  source 1..20: mol_type = other RNA
ttttccaatgagggttaaag

SEQ ID NO: 6289 - RNA, 20 nt, synthetic construct
  misc_feature 1..20: note = HBV-targeting guide sequence portion
  source 1..20: mol_type = other RNA
ttttccgaaagcccaggatg

SEQ ID NO: 6290 - RNA, 20 nt, synthetic construct
  misc_feature 1..20: note = HBV-targeting guide sequence portion
  source 1..20: mol_type = other RNA
ttttcctaatatacatctac

SEQ ID NO: 6291 - RNA, 20 nt, synthetic construct
  misc_feature 1..20: note = HBV-targeting guide sequence portion
  source 1..20: mol_type = other RNA
ttttccttgttgacaagaat

SEQ ID NO: 6292 - RNA, 20 nt, synthetic construct
  misc_feature 1..20: note = HBV-targeting guide sequence portion
  source 1..20: mol_type = other RNA
ttttcgccaacttacaaggc

SEQ ID NO: 6293 - RNA, 20 nt, synthetic construct
  misc_feature 1..20: note = HBV-targeting guide sequence portion
  source 1..20: mol_type = other RNA
ttttctagggggaactaccg

SEQ ID NO: 6294 - RNA, 20 nt, synthetic construct
  misc_feature 1..20: note = HBV-targeting guide sequence portion
  source 1..20: mol_type = other RNA
ttttctcattaactgtaagc

SEQ ID NO: 6295 - RNA, 20 nt, synthetic construct
  misc_feature 1..20: note = HBV-targeting guide sequence portion
  source 1..20: mol_type = other RNA
ttttctgaaacattctttga

SEQ ID NO: 6296 - RNA, 20 nt, synthetic construct
  misc_feature 1..20: note = HBV-targeting guide sequence portion
  source 1..20: mol_type = other RNA
ttttcttttgtctttgggtg

SEQ ID NO: 6297 - RNA, 20 nt, synthetic construct
  misc_feature 1..20: note = HBV-targeting guide sequence portion
  source 1..20: mol_type = other RNA
ttttgataatatcttggtgt

SEQ ID NO: 6298 - RNA, 20 nt, synthetic construct
  misc_feature 1..20: note = HBV-targeting guide sequence portion
  source 1..20: mol_type = other RNA
ttttgccttctgacttcttt

SEQ ID NO: 6299 - RNA, 20 nt, synthetic construct
  misc_feature 1..20: note = HBV-targeting guide sequence portion
  source 1..20: mol_type = other RNA
ttttgctcgcagccggtctg

SEQ ID NO: 6300 - RNA, 20 nt, synthetic construct
  misc_feature 1..20: note = HBV-targeting guide sequence portion
  source 1..20: mol_type = other RNA
ttttgctgccccttttacac

SEQ ID NO: 6301 - RNA, 20 nt, synthetic construct
  misc_feature 1..20: note = HBV-targeting guide sequence portion
  source 1..20: mol_type = other RNA
ttttggaagagaaacggtcc

SEQ ID NO: 6302 - RNA, 20 nt, synthetic construct
  misc_feature 1..20: note = HBV-targeting guide sequence portion
  source 1..20: mol_type = other RNA
ttttggagtgtggattcgca

SEQ ID NO: 6303 - RNA, 20 nt, synthetic construct
  misc_feature 1..20: note = HBV-targeting guide sequence portion
  source 1..20: mol_type = other RNA
ttttggccaagacacacggt

SEQ ID NO: 6304 - RNA, 20 nt, synthetic construct
  misc_feature 1..20: note = HBV-targeting guide sequence portion
  source 1..20: mol_type = other RNA
ttttggggtggagccctcag

SEQ ID NO: 6305 - RNA, 20 nt, synthetic construct
  misc_feature 1..20: note = HBV-targeting guide sequence portion
  source 1..20: mol_type = other RNA
ttttgtacagcaacaggagg

SEQ ID NO: 6306 - RNA, 20 nt, synthetic construct
  misc_feature 1..20: note = HBV-targeting guide sequence portion
  source 1..20: mol_type = other RNA
ttttgtctttgggtgtacat

SEQ ID NO: 6307 - RNA, 20 nt, synthetic construct
  misc_feature 1..20: note = HBV-targeting guide sequence portion
  source 1..20: mol_type = other RNA
ttttgtggcaatgatcccca

SEQ ID NO: 6308 - RNA, 20 nt, synthetic construct
  misc_feature 1..20: note = HBV-targeting guide sequence portion
  source 1..20: mol_type = other RNA
ttttgtgtatgatgtgattt

SEQ ID NO: 6309 - RNA, 20 nt, synthetic construct
  misc_feature 1..20: note = HBV-targeting guide sequence portion
  source 1..20: mol_type = other RNA
ttttgttagggtttaaatgt

SEQ ID NO: 6310 - RNA, 20 nt, synthetic construct
  misc_feature 1..20: note = HBV-targeting guide sequence portion
  source 1..20: mol_type = other RNA
tttttcacctctgcctaatc

SEQ ID NO: 6311 - RNA, 20 nt, synthetic construct
  misc_feature 1..20: note = HBV-targeting guide sequence portion
  source 1..20: mol_type = other RNA
tttttcgccaacttacaagg

SEQ ID NO: 6312 - RNA, 20 nt, synthetic construct
  misc_feature 1..20: note = HBV-targeting guide sequence portion
  source 1..20: mol_type = other RNA
tttttgataatatcttggtg

SEQ ID NO: 6313 - RNA, 20 nt, synthetic construct
  misc_feature 1..20: note = HBV-targeting guide sequence portion
  source 1..20: mol_type = other RNA
tttttgccttctgacttctt

SEQ ID NO: 6314 - RNA, 20 nt, synthetic construct
  misc_feature 1..20: note = HBV-targeting guide sequence portion
  source 1..20: mol_type = other RNA
ttttttgataatatcttggt

SEQ ID NO: 6315 - RNA, 21 nt, synthetic construct
  misc_feature 1..21: note = HBV-targeting guide sequence portion
  source 1..21: mol_type = other RNA
aaaaaatgtgaacagtttgta

SEQ ID NO: 6316 - RNA, 21 nt, synthetic construct
  misc_feature 1..21: note = HBV-targeting guide sequence portion
  source 1..21: mol_type = other RNA
aaaaacgagagtaactccaca

SEQ ID NO: 6317 - RNA, 21 nt, synthetic construct
  misc_feature 1..21: note = HBV-targeting guide sequence portion
  source 1..21: mol_type = other RNA
aaaaagtgaaagcctgcttag

SEQ ID NO: 6318 - RNA, 21 nt, synthetic construct
  misc_feature 1..21: note = HBV-targeting guide sequence portion
  source 1..21: mol_type = other RNA
aaaaagttgcatggtgctggt

SEQ ID NO: 6319 - RNA, 21 nt, synthetic construct
  misc_feature 1..21: note = HBV-targeting guide sequence portion
  source 1..21: mol_type = other RNA
aaaaatgtgaacagtttgtag

SEQ ID NO: 6320 - RNA, 21 nt, synthetic construct
  misc_feature 1..21: note = HBV-targeting guide sequence portion
  source 1..21: mol_type = other RNA
aaaacaaagagatggggttat

SEQ ID NO: 6321 - RNA, 21 nt, synthetic construct
  misc_feature 1..21: note = HBV-targeting guide sequence portion
  source 1..21: mol_type = other RNA
aaaacaagcggctaggagttc

SEQ ID NO: 6322 - RNA, 21 nt, synthetic construct
  misc_feature 1..21: note = HBV-targeting guide sequence portion
  source 1..21: mol_type = other RNA
aaaacacccgccttccataga

SEQ ID NO: 6323 - RNA, 21 nt, synthetic construct
  misc_feature 1..21: note = HBV-targeting guide sequence portion
  source 1..21: mol_type = other RNA
aaaacaccctcttttcctaat

SEQ ID NO: 6324 - RNA, 21 nt, synthetic construct
  misc_feature 1..21: note = HBV-targeting guide sequence portion
  source 1..21: mol_type = other RNA
aaaacccagaagacccacaat

SEQ ID NO: 6325 - RNA, 21 nt, synthetic construct
  misc_feature 1..21: note = HBV-targeting guide sequence portion
  source 1..21: mol_type = other RNA
aaaaccccgcctgtaacacga

SEQ ID NO: 6326 - RNA, 21 nt, synthetic construct
  misc_feature 1..21: note = HBV-targeting guide sequence portion
  source 1..21: mol_type = other RNA
aaaacctagcaggcataatca

SEQ ID NO: 6327 - RNA, 21 nt, synthetic construct
  misc_feature 1..21: note = HBV-targeting guide sequence portion
  source 1..21: mol_type = other RNA
aaaaccttcggatggaaactg

SEQ ID NO: 6328 - RNA, 21 nt, synthetic construct
  misc_feature 1..21: note = HBV-targeting guide sequence portion
  source 1..21: mol_type = other RNA
aaaacgagagtaactccacag

SEQ ID NO: 6329 - RNA, 21 nt, synthetic construct
  misc_feature 1..21: note = HBV-targeting guide sequence portion
  source 1..21: mol_type = other RNA
aaaacgccgcagacacatcca

SEQ ID NO: 6330 - RNA, 21 nt, synthetic construct
  misc_feature 1..21: note = HBV-targeting guide sequence portion
  source 1..21: mol_type = other RNA
aaaactcccggttaacaggcc

SEQ ID NO: 6331 - RNA, 21 nt, synthetic construct
  misc_feature 1..21: note = HBV-targeting guide sequence portion
  source 1..21: mol_type = other RNA
aaaagaaaattggtaacagcg

SEQ ID NO: 6332 - RNA, 21 nt, synthetic construct
  misc_feature 1..21: note = HBV-targeting guide sequence portion
  source 1..21: mol_type = other RNA
aaaagacaccaaatactctag

SEQ ID NO: 6333 - RNA, 21 nt, synthetic construct
  misc_feature 1..21: note = HBV-targeting guide sequence portion
  source 1..21: mol_type = other RNA
aaaagacggttgaaattgatt

SEQ ID NO: 6334 - RNA, 21 nt, synthetic construct
  misc_feature 1..21: note = HBV-targeting guide sequence portion
  source 1..21: mol_type = other RNA
aaaagagggtgttttccaatg

SEQ ID NO: 6335 - RNA, 21 nt, synthetic construct
  misc_feature 1..21: note = HBV-targeting guide sequence portion
  source 1..21: mol_type = other RNA
aaaaggcctccgtgcggtggg

SEQ ID NO: 6336 - RNA, 21 nt, synthetic construct
  misc_feature 1..21: note = HBV-targeting guide sequence portion
  source 1..21: mol_type = other RNA
aaaaggggcagcaaaacccag

SEQ ID NO: 6337 - RNA, 21 nt, synthetic construct
  misc_feature 1..21: note = HBV-targeting guide sequence portion
  source 1..21: mol_type = other RNA
aaaagtaagacaagaaatgtg

SEQ ID NO: 6338 - RNA, 21 nt, synthetic construct
  misc_feature 1..21: note = HBV-targeting guide sequence portion
  source 1..21: mol_type = other RNA
aaaagtgaaagcctgcttaga

SEQ ID NO: 6339 - RNA, 21 nt, synthetic construct
  misc_feature 1..21: note = HBV-targeting guide sequence portion
  source 1..21: mol_type = other RNA
aaaagttgcatggtgctggtg

SEQ ID NO: 6340 - RNA, 21 nt, synthetic construct
  misc_feature 1..21: note = HBV-targeting guide sequence portion
  source 1..21: mol_type = other RNA
aaaatcaaagaatgtttcaga

SEQ ID NO: 6341 - RNA, 21 nt, synthetic construct
  misc_feature 1..21: note = HBV-targeting guide sequence portion
  source 1..21: mol_type = other RNA
aaaatcacatcatacacaaaa

SEQ ID NO: 6342 - RNA, 21 nt, synthetic construct
  misc_feature 1..21: note = HBV-targeting guide sequence portion
  source 1..21: mol_type = other RNA
aaaatgtgaacagtttgtagg

SEQ ID NO: 6343 - RNA, 21 nt, synthetic construct
  misc_feature 1..21: note = HBV-targeting guide sequence portion
  source 1..21: mol_type = other RNA
aaaattcctatgggagtgggc

SEQ ID NO: 6344 - RNA, 21 nt, synthetic construct
  misc_feature 1..21: note = HBV-targeting guide sequence portion
  source 1..21: mol_type = other RNA
aaaattcgcagtccccaacct

SEQ ID NO: 6345 - RNA, 21 nt, synthetic construct
  misc_feature 1..21: note = HBV-targeting guide sequence portion
  source 1..21: mol_type = other RNA
aaaattgagagaagtccacca

SEQ ID NO: 6346 - RNA, 21 nt, synthetic construct
  misc_feature 1..21: note = HBV-targeting guide sequence portion
  source 1..21: mol_type = other RNA
aaaattggtaacagcggtata

SEQ ID NO: 6347 - RNA, 21 nt, synthetic construct
  misc_feature 1..21: note = HBV-targeting guide sequence portion
  source 1..21: mol_type = other RNA
aaaatttcccaccttatgagt

SEQ ID NO: 6348 - RNA, 21 nt, synthetic construct
  misc_feature 1..21: note = HBV-targeting guide sequence portion
  source 1..21: mol_type = other RNA
aaacaaacagtctttgaagta

SEQ ID NO: 6349 - RNA, 21 nt, synthetic construct
  misc_feature 1..21: note = HBV-targeting guide sequence portion
  source 1..21: mol_type = other RNA
aaacaaagagatggggttatt

SEQ ID NO: 6350 - RNA, 21 nt, synthetic construct
  misc_feature 1..21: note = HBV-targeting guide sequence portion
  source 1..21: mol_type = other RNA
aaacaaaggacgtcccgcgca

SEQ ID NO: 6351 - RNA, 21 nt, synthetic construct
  misc_feature 1..21: note = HBV-targeting guide sequence portion
  source 1..21: mol_type = other RNA
aaacaagcggctaggagttcc

SEQ ID NO: 6352 - RNA, 21 nt, synthetic construct
  misc_feature 1..21: note = HBV-targeting guide sequence portion
  source 1..21: mol_type = other RNA
aaacaatacctgaacctttac

SEQ ID NO: 6353 - RNA, 21 nt, synthetic construct
  misc_feature 1..21: note = HBV-targeting guide sequence portion
  source 1..21: mol_type = other RNA
aaacacccgccttccatagag

SEQ ID NO: 6354 - RNA, 21 nt, synthetic construct
  misc_feature 1..21: note = HBV-targeting guide sequence portion
  source 1..21: mol_type = other RNA
aaacaccctcttttcctaata

SEQ ID NO: 6355 - RNA, 21 nt, synthetic construct
  misc_feature 1..21: note = HBV-targeting guide sequence portion
  source 1..21: mol_type = other RNA
aaacactcatcctcaggccat

SEQ ID NO: 6356 - RNA, 21 nt, synthetic construct
  misc_feature 1..21: note = HBV-targeting guide sequence portion
  source 1..21: mol_type = other RNA
aaacacttggcacagacctgg

SEQ ID NO: 6357 - RNA, 21 nt, synthetic construct
  misc_feature 1..21: note = HBV-targeting guide sequence portion
  source 1..21: mol_type = other RNA
aaacagtctttgaagtatgcc

SEQ ID NO: 6358 - RNA, 21 nt, synthetic construct
  misc_feature 1..21: note = HBV-targeting guide sequence portion
  source 1..21: mol_type = other RNA
aaacagtgggggaaagcccta

SEQ ID NO: 6359 - RNA, 21 nt, synthetic construct
  misc_feature 1..21: note = HBV-targeting guide sequence portion
  source 1..21: mol_type = other RNA
aaacataccttgatagtccag

SEQ ID NO: 6360 - RNA, 21 nt, synthetic construct
  misc_feature 1..21: note = HBV-targeting guide sequence portion
  source 1..21: mol_type = other RNA
aaacattctcgggactgacaa

SEQ ID NO: 6361 - RNA, 21 nt, synthetic construct
  misc_feature 1..21: note = HBV-targeting guide sequence portion
  source 1..21: mol_type = other RNA
aaacattctttgattttgtgt

SEQ ID NO: 6362 - RNA, 21 nt, synthetic construct
  misc_feature 1..21: note = HBV-targeting guide sequence portion
  source 1..21: mol_type = other RNA
aaaccacaatagttgtctgaa

SEQ ID NO: 6363 - RNA, 21 nt, synthetic construct
  misc_feature 1..21: note = HBV-targeting guide sequence portion
  source 1..21: mol_type = other RNA
aaacccagaagacccacaatt

SEQ ID NO: 6364 - RNA, 21 nt, synthetic construct
  misc_feature 1..21: note = HBV-targeting guide sequence portion
  source 1..21: mol_type = other RNA
aaaccccgcctgtaacacgag

SEQ ID NO: 6365 - RNA, 21 nt, synthetic construct
  misc_feature 1..21: note = HBV-targeting guide sequence portion
  source 1..21: mol_type = other RNA
aaaccctaacaaaacaaagag

SEQ ID NO: 6366 - RNA, 21 nt, synthetic construct
  misc_feature 1..21: note = HBV-targeting guide sequence portion
  source 1..21: mol_type = other RNA
aaaccctgttccgactactgc

SEQ ID NO: 6367 - RNA, 21 nt, synthetic construct
  misc_feature 1..21: note = HBV-targeting guide sequence portion
  source 1..21: mol_type = other RNA
aaacctagcaggcataatcaa

SEQ ID NO: 6368 - RNA, 21 nt, synthetic construct
  misc_feature 1..21: note = HBV-targeting guide sequence portion
  source 1..21: mol_type = other RNA
aaaccttattatccagaacat

SEQ ID NO: 6369 - RNA, 21 nt, synthetic construct
  misc_feature 1..21: note = HBV-targeting guide sequence portion
  source 1..21: mol_type = other RNA
aaaccttcggatggaaactgc

SEQ ID NO: 6370 - RNA, 21 nt, synthetic construct
  misc_feature 1..21: note = HBV-targeting guide sequence portion
  source 1..21: mol_type = other RNA
aaaccttgccagcaaatccgc

SEQ ID NO: 6371 - RNA, 21 nt, synthetic construct
  misc_feature 1..21: note = HBV-targeting guide sequence portion
  source 1..21: mol_type = other RNA
aaacgagagtaactccacagt

SEQ ID NO: 6372 - RNA, 21 nt, synthetic construct
  misc_feature 1..21: note = HBV-targeting guide sequence portion
  source 1..21: mol_type = other RNA
aaacgccgcagacacatccag

SEQ ID NO: 6373 - RNA, 21 nt, synthetic construct
  misc_feature 1..21: note = HBV-targeting guide sequence portion
  source 1..21: mol_type = other RNA
aaacgggctgaggcccactcc

SEQ ID NO: 6374 - RNA, 21 nt, synthetic construct
  misc_feature 1..21: note = HBV-targeting guide sequence portion
  source 1..21: mol_type = other RNA
aaacggtcctagagtatttgg

SEQ ID NO: 6375 - RNA, 21 nt, synthetic construct
  misc_feature 1..21: note = HBV-targeting guide sequence portion
  source 1..21: mol_type = other RNA
aaactagacactatttacaca

SEQ ID NO: 6376 - RNA, 21 nt, synthetic construct
  misc_feature 1..21: note = HBV-targeting guide sequence portion
  source 1..21: mol_type = other RNA
aaactccaacaatccagattg

SEQ ID NO: 6377 - RNA, 21 nt, synthetic construct
  misc_feature 1..21: note = HBV-targeting guide sequence portion
  source 1..21: mol_type = other RNA
aaactcccggttaacaggcct

SEQ ID NO: 6378 - RNA, 21 nt, synthetic construct
  misc_feature 1..21: note = HBV-targeting guide sequence portion
  source 1..21: mol_type = other RNA
aaactctgcaagatcccagag

SEQ ID NO: 6379 - RNA, 21 nt, synthetic construct
  misc_feature 1..21: note = HBV-targeting guide sequence portion
  source 1..21: mol_type = other RNA
aaactgagccaagagaaacgg

SEQ ID NO: 6380 - RNA, 21 nt, synthetic construct
  misc_feature 1..21: note = HBV-targeting guide sequence portion
  source 1..21: mol_type = other RNA
aaactgcacctgtattcccat

SEQ ID NO: 6381 - RNA, 21 nt, synthetic construct
  misc_feature 1..21: note = HBV-targeting guide sequence portion
  source 1..21: mol_type = other RNA
aaactgttcacattttttgat

SEQ ID NO: 6382 - RNA, 21 nt, synthetic construct
  misc_feature 1..21: note = HBV-targeting guide sequence portion
  source 1..21: mol_type = other RNA
aaagaaaattggtaacagcgg

SEQ ID NO: 6383 - RNA, 21 nt, synthetic construct
  misc_feature 1..21: note = HBV-targeting guide sequence portion
  source 1..21: mol_type = other RNA
aaagaagtcagaaggcaaaaa

SEQ ID NO: 6384 - RNA, 21 nt, synthetic construct
  misc_feature 1..21: note = HBV-targeting guide sequence portion
  source 1..21: mol_type = other RNA
aaagaatcccagaggattgct

SEQ ID NO: 6385 - RNA, 21 nt, synthetic construct
  misc_feature 1..21: note = HBV-targeting guide sequence portion
  source 1..21: mol_type = other RNA
aaagaatgtttcagaaaactc

SEQ ID NO: 6386 - RNA, 21 nt, synthetic construct
  misc_feature 1..21: note = HBV-targeting guide sequence portion
  source 1..21: mol_type = other RNA
aaagaattgcttgcctgagtg

SEQ ID NO: 6387 - RNA, 21 nt, synthetic construct
  misc_feature 1..21: note = HBV-targeting guide sequence portion
  source 1..21: mol_type = other RNA
aaagaatttggagctactgtg

SEQ ID NO: 6388 - RNA, 21 nt, synthetic construct
  misc_feature 1..21: note = HBV-targeting guide sequence portion
  source 1..21: mol_type = other RNA
aaagacaaaagaaaattggta

SEQ ID NO: 6389 - RNA, 21 nt, synthetic construct
  misc_feature 1..21: note = HBV-targeting guide sequence portion
  source 1..21: mol_type = other RNA
aaagacaccaaatactctagg

SEQ ID NO: 6390 - RNA, 21 nt, synthetic construct
  misc_feature 1..21: note = HBV-targeting guide sequence portion
  source 1..21: mol_type = other RNA
aaagacaggtacagtagaaga

SEQ ID NO: 6391 - RNA, 21 nt, synthetic construct
  misc_feature 1..21: note = HBV-targeting guide sequence portion
  source 1..21: mol_type = other RNA
aaagacggttgaaattgatta

SEQ ID NO: 6392 - RNA, 21 nt, synthetic construct
  misc_feature 1..21: note = HBV-targeting guide sequence portion
  source 1..21: mol_type = other RNA
aaagactgggaggagttgggg

SEQ ID NO: 6393 - RNA, 21 nt, synthetic construct
  misc_feature 1..21: note = HBV-targeting guide sequence portion
  source 1..21: mol_type = other RNA
aaagactgtttgtttaaagac

SEQ ID NO: 6394 - RNA, 21 nt, synthetic construct
  misc_feature 1..21: note = HBV-targeting guide sequence portion
  source 1..21: mol_type = other RNA
aaagagaggtgcgccccgtgg

SEQ ID NO: 6395 - RNA, 21 nt, synthetic construct
  misc_feature 1..21: note = HBV-targeting guide sequence portion
  source 1..21: mol_type = other RNA
aaagagatggggttattctct

SEQ ID NO: 6396 - RNA, 21 nt, synthetic construct
  misc_feature 1..21: note = HBV-targeting guide sequence portion
  source 1..21: mol_type = other RNA
aaagagggtgttttccaatga

SEQ ID NO: 6397 - RNA, 21 nt, synthetic construct
  misc_feature 1..21: note = HBV-targeting guide sequence portion
  source 1..21: mol_type = other RNA
aaagatcattaatctaatctc

SEQ ID NO: 6398 - RNA, 21 nt, synthetic construct
  misc_feature 1..21: note = HBV-targeting guide sequence portion
  source 1..21: mol_type = other RNA
aaagattctgccccatgctgt

SEQ ID NO: 6399 - RNA, 21 nt, synthetic construct
  misc_feature 1..21: note = HBV-targeting guide sequence portion
  source 1..21: mol_type = other RNA
aaagcaggataaccacattgt

SEQ ID NO: 6400 - RNA, 21 nt, synthetic construct
  misc_feature 1..21: note = HBV-targeting guide sequence portion
  source 1..21: mol_type = other RNA
aaagccaaacagtgggggaaa

SEQ ID NO: 6401 - RNA, 21 nt, synthetic construct
  misc_feature 1..21: note = HBV-targeting guide sequence portion
  source 1..21: mol_type = other RNA
aaagccacccaaggcacagct

SEQ ID NO: 6402 - RNA, 21 nt, synthetic construct
  misc_feature 1..21: note = HBV-targeting guide sequence portion
  source 1..21: mol_type = other RNA
aaagcccaggatgatgggatg

SEQ ID NO: 6403 - RNA, 21 nt, synthetic construct
  misc_feature 1..21: note = HBV-targeting guide sequence portion
  source 1..21: mol_type = other RNA
aaagccccgtaaaatttccca

SEQ ID NO: 6404 - RNA, 21 nt, synthetic construct
  misc_feature 1..21: note = HBV-targeting guide sequence portion
  source 1..21: mol_type = other RNA
aaagccctacgaaccactgaa

SEQ ID NO: 6405 - RNA, 21 nt, synthetic construct
  misc_feature 1..21: note = HBV-targeting guide sequence portion
  source 1..21: mol_type = other RNA
aaagcctgcttagattgaata

SEQ ID NO: 6406 - RNA, 21 nt, synthetic construct
  misc_feature 1..21: note = HBV-targeting guide sequence portion
  source 1..21: mol_type = other RNA
aaaggacgtcccgcgcaggat

SEQ ID NO: 6407 - RNA, 21 nt, synthetic construct
  misc_feature 1..21: note = HBV-targeting guide sequence portion
  source 1..21: mol_type = other RNA
aaaggcctccgtgcggtgggg

SEQ ID NO: 6408 - RNA, 21 nt, synthetic construct
  misc_feature 1..21: note = HBV-targeting guide sequence portion
  source 1..21: mol_type = other RNA
aaaggccttgtaagttggcga

SEQ ID NO: 6409 - RNA, 21 nt, synthetic construct
  misc_feature 1..21: note = HBV-targeting guide sequence portion
  source 1..21: mol_type = other RNA
aaagggactcaagatgctgta

SEQ ID NO: 6410 - RNA, 21 nt, synthetic construct
  misc_feature 1..21: note = HBV-targeting guide sequence portion
  source 1..21: mol_type = other RNA
aaaggggcagcaaaacccaga

SEQ ID NO: 6411 - RNA, 21 nt, synthetic construct
  misc_feature 1..21: note = HBV-targeting guide sequence portion
  source 1..21: mol_type = other RNA
aaaggttcaggtattgtttac

SEQ ID NO: 6412 - RNA, 21 nt, synthetic construct
  misc_feature 1..21: note = HBV-targeting guide sequence portion
  source 1..21: mol_type = other RNA
aaaggttccacgcatgcgctg

SEQ ID NO: 6413 - RNA, 21 nt, synthetic construct
  misc_feature 1..21: note = HBV-targeting guide sequence portion
  source 1..21: mol_type = other RNA
aaagtaagacaagaaatgtga

SEQ ID NO: 6414 - RNA, 21 nt, synthetic construct
  misc_feature 1..21: note = HBV-targeting guide sequence portion
  source 1..21: mol_type = other RNA
aaagtgaaagcctgcttagat

SEQ ID NO: 6415 - RNA, 21 nt, synthetic construct
  misc_feature 1..21: note = HBV-targeting guide sequence portion
  source 1..21: mol_type = other RNA
aaagtgtgtcaacgaattgtg

SEQ ID NO: 6416 - RNA, 21 nt, synthetic construct
  misc_feature 1..21: note = HBV-targeting guide sequence portion
  source 1..21: mol_type = other RNA
aaagttcagacaactattgtg

SEQ ID NO: 6417 - RNA, 21 nt, synthetic construct
  misc_feature 1..21: note = HBV-targeting guide sequence portion
  source 1..21: mol_type = other RNA
aaagttgcatggtgctggtgc

SEQ ID NO: 6418 - RNA, 21 nt, synthetic construct
  misc_feature 1..21: note = HBV-targeting guide sequence portion
  source 1..21: mol_type = other RNA
aaatactctaggaccgtttct

SEQ ID NO: 6419 - RNA, 21 nt, synthetic construct
  misc_feature 1..21: note = HBV-targeting guide sequence portion
  source 1..21: mol_type = other RNA
aaatacttgcccttggataag

SEQ ID NO: 6420 - RNA, 21 nt, synthetic construct
  misc_feature 1..21: note = HBV-targeting guide sequence portion
  source 1..21: mol_type = other RNA
aaatagtgtctagtttggaag

SEQ ID NO: 6421 - RNA, 21 nt, synthetic construct
  misc_feature 1..21: note = HBV-targeting guide sequence portion
  source 1..21: mol_type = other RNA
aaatatacatcgttcccatgg

SEQ ID NO: 6422 - RNA, 21 nt, synthetic construct
  misc_feature 1..21: note = HBV-targeting guide sequence portion
  source 1..21: mol_type = other RNA
aaatcaaagaatgtttcagaa

SEQ ID NO: 6423 - RNA, 21 nt, synthetic construct
  misc_feature 1..21: note = HBV-targeting guide sequence portion
  source 1..21: mol_type = other RNA
aaatcacatcatacacaaaat

SEQ ID NO: 6424 - RNA, 21 nt, synthetic construct
  misc_feature 1..21: note = HBV-targeting guide sequence portion
  source 1..21: mol_type = other RNA
aaatccgcctcctgcctctac

SEQ ID NO: 6425 - RNA, 21 nt, synthetic construct
  misc_feature 1..21: note = HBV-targeting guide sequence portion
  source 1..21: mol_type = other RNA
aaatgcccctatcctatcaac

SEQ ID NO: 6426 - RNA, 21 nt, synthetic construct
  misc_feature 1..21: note = HBV-targeting guide sequence portion
  source 1..21: mol_type = other RNA
aaatggcactagtaaactgag

SEQ ID NO: 6427 - RNA, 21 nt, synthetic construct
  misc_feature 1..21: note = HBV-targeting guide sequence portion
  source 1..21: mol_type = other RNA
aaatgtacacccaaagacaaa

SEQ ID NO: 6428 - RNA, 21 nt, synthetic construct
  misc_feature 1..21: note = HBV-targeting guide sequence portion
  source 1..21: mol_type = other RNA
aaatgtgaaaccacaatagtt

SEQ ID NO: 6429 - RNA, 21 nt, synthetic construct
  misc_feature 1..21: note = HBV-targeting guide sequence portion
  source 1..21: mol_type = other RNA
aaatgtgaacagtttgtaggc

SEQ ID NO: 6430 - RNA, 21 nt, synthetic construct
  misc_feature 1..21: note = HBV-targeting guide sequence portion
  source 1..21: mol_type = other RNA
aaattaagagaataaccccat

SEQ ID NO: 6431 - RNA, 21 nt, synthetic construct
  misc_feature 1..21: note = HBV-targeting guide sequence portion
  source 1..21: mol_type = other RNA
aaattagtacccacccaggta

SEQ ID NO: 6432 - RNA, 21 nt, synthetic construct
  misc_feature 1..21: note = HBV-targeting guide sequence portion
  source 1..21: mol_type = other RNA
aaattcaccaaatacttgccc

SEQ ID NO: 6433 - RNA, 21 nt, synthetic construct
  misc_feature 1..21: note = HBV-targeting guide sequence portion
  source 1..21: mol_type = other RNA
aaattcctatgggagtgggcc

SEQ ID NO: 6434 - RNA, 21 nt, synthetic construct
  misc_feature 1..21: note = HBV-targeting guide sequence portion
  source 1..21: mol_type = other RNA
aaattcgcagtccccaacctc

SEQ ID NO: 6435 - RNA, 21 nt, synthetic construct
  misc_feature 1..21: note = HBV-targeting guide sequence portion
  source 1..21: mol_type = other RNA
aaattctttatatgggtcaat

SEQ ID NO: 6436 - RNA, 21 nt, synthetic construct
  misc_feature 1..21: note = HBV-targeting guide sequence portion
  source 1..21: mol_type = other RNA
aaattgagagaagtccaccac

SEQ ID NO: 6437 - RNA, 21 nt, synthetic construct
  misc_feature 1..21: note = HBV-targeting guide sequence portion
  source 1..21: mol_type = other RNA
aaattgattatgcctgctagg

SEQ ID NO: 6438 - RNA, 21 nt, synthetic construct
  misc_feature 1..21: note = HBV-targeting guide sequence portion
  source 1..21: mol_type = other RNA
aaattggtaacagcggtataa

SEQ ID NO: 6439 - RNA, 21 nt, synthetic construct
  misc_feature 1..21: note = HBV-targeting guide sequence portion
  source 1..21: mol_type = other RNA
aaattggtctgcgcaccagca

SEQ ID NO: 6440 - RNA, 21 nt, synthetic construct
  misc_feature 1..21: note = HBV-targeting guide sequence portion
  source 1..21: mol_type = other RNA
aaatttcccaccttatgagtc

SEQ ID NO: 6441 - RNA, 21 nt, synthetic construct
  misc_feature 1..21: note = HBV-targeting guide sequence portion
  source 1..21: mol_type = other RNA
aaattttacggggctttattc

SEQ ID NO: 6442 - RNA, 21 nt, synthetic construct
  misc_feature 1..21: note = HBV-targeting guide sequence portion
  source 1..21: mol_type = other RNA
aacaaaacaaagagatggggt

SEQ ID NO: 6443 - RNA, 21 nt, synthetic construct
  misc_feature 1..21: note = HBV-targeting guide sequence portion
  source 1..21: mol_type = other RNA
aacaaacagtctttgaagtat

SEQ ID NO: 6444 - RNA, 21 nt, synthetic construct
  misc_feature 1..21: note = HBV-targeting guide sequence portion
  source 1..21: mol_type = other RNA
aacaaagagatggggttattc

SEQ ID NO: 6445 - RNA, 21 nt, synthetic construct
  misc_feature 1..21: note = HBV-targeting guide sequence portion
  source 1..21: mol_type = other RNA
aacaaaggacgtcccgcgcag

SEQ ID NO: 6446 - RNA, 21 nt, synthetic construct
  misc_feature 1..21: note = HBV-targeting guide sequence portion
  source 1..21: mol_type = other RNA
aacaaatggcactagtaaact

SEQ ID NO: 6447 - RNA, 21 nt, synthetic construct
  misc_feature 1..21: note = HBV-targeting guide sequence portion
  source 1..21: mol_type = other RNA
aacaacacaagtctccggaag

SEQ ID NO: 6448 - RNA, 21 nt, synthetic construct
  misc_feature 1..21: note = HBV-targeting guide sequence portion
  source 1..21: mol_type = other RNA
aacaagaagatgaggcatagc

SEQ ID NO: 6449 - RNA, 21 nt, synthetic construct
  misc_feature 1..21: note = HBV-targeting guide sequence portion
  source 1..21: mol_type = other RNA
aacaagagatgattaggcaga

SEQ ID NO: 6450 - RNA, 21 nt, synthetic construct
  misc_feature 1..21: note = HBV-targeting guide sequence portion
  source 1..21: mol_type = other RNA
aacaagagctacagcatgggg

SEQ ID NO: 6451 - RNA, 21 nt, synthetic construct
  misc_feature 1..21: note = HBV-targeting guide sequence portion
  source 1..21: mol_type = other RNA
aacaagcggctaggagttccg

SEQ ID NO: 6452 - RNA, 21 nt, synthetic construct
  misc_feature 1..21: note = HBV-targeting guide sequence portion
  source 1..21: mol_type = other RNA
aacaaggaaaaccccgcctgt

SEQ ID NO: 6453 - RNA, 21 nt, synthetic construct
  misc_feature 1..21: note = HBV-targeting guide sequence portion
  source 1..21: mol_type = other RNA
aacaaggatccctggccagac

SEQ ID NO: 6454 - RNA, 21 nt, synthetic construct
  misc_feature 1..21: note = HBV-targeting guide sequence portion
  source 1..21: mol_type = other RNA
aacaaggtaggagctggagca

SEQ ID NO: 6455 - RNA, 21 nt, synthetic construct
  misc_feature 1..21: note = HBV-targeting guide sequence portion
  source 1..21: mol_type = other RNA
aacaatacctgaacctttacc

SEQ ID NO: 6456 - RNA, 21 nt, synthetic construct
  misc_feature 1..21: note = HBV-targeting guide sequence portion
  source 1..21: mol_type = other RNA
aacaatcaatgacatagccca

SEQ ID NO: 6457 - RNA, 21 nt, synthetic construct
  misc_feature 1..21: note = HBV-targeting guide sequence portion
  source 1..21: mol_type = other RNA
aacaatccagattgggacttc

SEQ ID NO: 6458 - RNA, 21 nt, synthetic construct
  misc_feature 1..21: note = HBV-targeting guide sequence portion
  source 1..21: mol_type = other RNA
aacaatgctcaggagactcca

SEQ ID NO: 6459 - RNA, 21 nt, synthetic construct
  misc_feature 1..21: note = HBV-targeting guide sequence portion
  source 1..21: mol_type = other RNA
aacacaagtctccggaagtgt

SEQ ID NO: 6460 - RNA, 21 nt, synthetic construct
  misc_feature 1..21: note = HBV-targeting guide sequence portion
  source 1..21: mol_type = other RNA
aacacatagcgcctcattctg

SEQ ID NO: 6461 - RNA, 21 nt, synthetic construct
  misc_feature 1..21: note = HBV-targeting guide sequence portion
  source 1..21: mol_type = other RNA
aacacccgccttccatagagt

SEQ ID NO: 6462 - RNA, 21 nt, synthetic construct
  misc_feature 1..21: note = HBV-targeting guide sequence portion
  source 1..21: mol_type = other RNA
aacaccctcttttcctaatat

SEQ ID NO: 6463 - RNA, 21 nt, synthetic construct
  misc_feature 1..21: note = HBV-targeting guide sequence portion
  source 1..21: mol_type = other RNA
aacacgagcaggggtcctagg

SEQ ID NO: 6464 - RNA, 21 nt, synthetic construct
  misc_feature 1..21: note = HBV-targeting guide sequence portion
  source 1..21: mol_type = other RNA
aacactcatatgggcctaaag

SEQ ID NO: 6465 - RNA, 21 nt, synthetic construct
  misc_feature 1..21: note = HBV-targeting guide sequence portion
  source 1..21: mol_type = other RNA
aacactcatcctcaggccatg

SEQ ID NO: 6466 - RNA, 21 nt, synthetic construct
  misc_feature 1..21: note = HBV-targeting guide sequence portion
  source 1..21: mol_type = other RNA
aacacttccggagacttgtgt

SEQ ID NO: 6467 - RNA, 21 nt, synthetic construct
  misc_feature 1..21: note = HBV-targeting guide sequence portion
  source 1..21: mol_type = other RNA
aacacttggcacagacctggc

SEQ ID NO: 6468 - RNA, 21 nt, synthetic construct
  misc_feature 1..21: note = HBV-targeting guide sequence portion
  source 1..21: mol_type = other RNA
aacagagttgtcagtcccgag

SEQ ID NO: 6469 - RNA, 21 nt, synthetic construct
  misc_feature 1..21: note = HBV-targeting guide sequence portion
  source 1..21: mol_type = other RNA
aacagcggtataaagggactc

SEQ ID NO: 6470 - RNA, 21 nt, synthetic construct
  misc_feature 1..21: note = HBV-targeting guide sequence portion
  source 1..21: mol_type = other RNA
aacaggagggatacatagagg

SEQ ID NO: 6471 - RNA, 21 nt, synthetic construct
  misc_feature 1..21: note = HBV-targeting guide sequence portion
  source 1..21: mol_type = other RNA
aacaggcctattgattggaaa

SEQ ID NO: 6472 - RNA, 21 nt, synthetic construct
  misc_feature 1..21: note = HBV-targeting guide sequence portion
  source 1..21: mol_type = other RNA
aacagggtttactgttcctga

SEQ ID NO: 6473 - RNA, 21 nt, synthetic construct
  misc_feature 1..21: note = HBV-targeting guide sequence portion
  source 1..21: mol_type = other RNA
aacagtaaaccctgttccgac

SEQ ID NO: 6474 - RNA, 21 nt, synthetic construct
  misc_feature 1..21: note = HBV-targeting guide sequence portion
  source 1..21: mol_type = other RNA
aacagtaggacatgaacaaga

SEQ ID NO: 6475 - RNA, 21 nt, synthetic construct
  misc_feature 1..21: note = HBV-targeting guide sequence portion
  source 1..21: mol_type = other RNA
aacagtctttgaagtatgcct

SEQ ID NO: 6476 - RNA, 21 nt, synthetic construct
  misc_feature 1..21: note = HBV-targeting guide sequence portion
  source 1..21: mol_type = other RNA
aacagtgggggaaagccctac

SEQ ID NO: 6477 - RNA, 21 nt, synthetic construct
  misc_feature 1..21: note = HBV-targeting guide sequence portion
  source 1..21: mol_type = other RNA
aacagtttgtaggcccgctta

SEQ ID NO: 6478 - RNA, 21 nt, synthetic construct
  misc_feature 1..21: note = HBV-targeting guide sequence portion
  source 1..21: mol_type = other RNA
aacataccttgatagtccaga

SEQ ID NO: 6479 - RNA, 21 nt, synthetic construct
  misc_feature 1..21: note = HBV-targeting guide sequence portion
  source 1..21: mol_type = other RNA
aacatcacatcaggattccta

SEQ ID NO: 6480 - RNA, 21 nt, synthetic construct
  misc_feature 1..21: note = HBV-targeting guide sequence portion
  source 1..21: mol_type = other RNA
aacatctagttaatcattact

SEQ ID NO: 6481 - RNA, 21 nt, synthetic construct
  misc_feature 1..21: note = HBV-targeting guide sequence portion
  source 1..21: mol_type = other RNA
aacatggagaacatcacatca

SEQ ID NO: 6482 - RNA, 21 nt, synthetic construct
  misc_feature 1..21: note = HBV-targeting guide sequence portion
  source 1..21: mol_type = other RNA
aacattctcgggactgacaac

SEQ ID NO: 6483 - RNA, 21 nt, synthetic construct
  misc_feature 1..21: note = HBV-targeting guide sequence portion
  source 1..21: mol_type = other RNA
aacattctttgattttgtgta

SEQ ID NO: 6484 - RNA, 21 nt, synthetic construct
  misc_feature 1..21: note = HBV-targeting guide sequence portion
  source 1..21: mol_type = other RNA
aacattgagatccccgagatt

SEQ ID NO: 6485 - RNA, 21 nt, synthetic construct
  misc_feature 1..21: note = HBV-targeting guide sequence portion
  source 1..21: mol_type = other RNA
aaccaacaagaagatgaggca

SEQ ID NO: 6486 - RNA, 21 nt, synthetic construct
  misc_feature 1..21: note = HBV-targeting guide sequence portion
  source 1..21: mol_type = other RNA
aaccacaatagttgtctgaac

SEQ ID NO: 6487 - RNA, 21 nt, synthetic construct
  misc_feature 1..21: note = HBV-targeting guide sequence portion
  source 1..21: mol_type = other RNA
aaccacattgtgtaaaagggg

SEQ ID NO: 6488 - RNA, 21 nt, synthetic construct
  misc_feature 1..21: note = HBV-targeting guide sequence portion
  source 1..21: mol_type = other RNA
aaccaccagcacgggaccctg

SEQ ID NO: 6489 - RNA, 21 nt, synthetic construct
  misc_feature 1..21: note = HBV-targeting guide sequence portion
  source 1..21: mol_type = other RNA
aaccactgaacaaatggcact

SEQ ID NO: 6490 - RNA, 21 nt, synthetic construct
  misc_feature 1..21: note = HBV-targeting guide sequence portion
  source 1..21: mol_type = other RNA
aaccaggacaagttggaggac

SEQ ID NO: 6491 - RNA, 21 nt, synthetic construct
  misc_feature 1..21: note = HBV-targeting guide sequence portion
  source 1..21: mol_type = other RNA
aaccagtgggggttgcatcag

SEQ ID NO: 6492 - RNA, 21 nt, synthetic construct
  misc_feature 1..21: note = HBV-targeting guide sequence portion
  source 1..21: mol_type = other RNA
aacccagaagacccacaattc

SEQ ID NO: 6493 - RNA, 21 nt, synthetic construct
  misc_feature 1..21: note = HBV-targeting guide sequence portion
  source 1..21: mol_type = other RNA
aaccccatctctttgttttgt

SEQ ID NO: 6494 - RNA, 21 nt, synthetic construct
  misc_feature 1..21: note = HBV-targeting guide sequence portion
  source 1..21: mol_type = other RNA
aacccccactggttggggctt

SEQ ID NO: 6495 - RNA, 21 nt, synthetic construct
  misc_feature 1..21: note = HBV-targeting guide sequence portion
  source 1..21: mol_type = other RNA
aaccccgcctgtaacacgagc

SEQ ID NO: 6496 - RNA, 21 nt, synthetic construct
  misc_feature 1..21: note = HBV-targeting guide sequence portion
  source 1..21: mol_type = other RNA
aaccctaacaaaacaaagaga

SEQ ID NO: 6497 - RNA, 21 nt, synthetic construct
  misc_feature 1..21: note = HBV-targeting guide sequence portion
  source 1..21: mol_type = other RNA
aaccctagcccgaatgctcca

SEQ ID NO: 6498 - RNA, 21 nt, synthetic construct
  misc_feature 1..21: note = HBV-targeting guide sequence portion
  source 1..21: mol_type = other RNA
aaccctcattggaaaacaccc

SEQ ID NO: 6499 - RNA, 21 nt, synthetic construct
  misc_feature 1..21: note = HBV-targeting guide sequence portion
  source 1..21: mol_type = other RNA
aaccctgttccgactactgcc

SEQ ID NO: 6500 - RNA, 21 nt, synthetic construct
  misc_feature 1..21: note = HBV-targeting guide sequence portion
  source 1..21: mol_type = other RNA
aaccgggagttttctgaaaca

SEQ ID NO: 6501 - RNA, 21 nt, synthetic construct
  misc_feature 1..21: note = HBV-targeting guide sequence portion
  source 1..21: mol_type = other RNA
aaccgtcttttctcattaact

SEQ ID NO: 6502 - RNA, 21 nt, synthetic construct
  misc_feature 1..21: note = HBV-targeting guide sequence portion
  source 1..21: mol_type = other RNA
aacctagcaggcataatcaat

SEQ ID NO: 6503 - RNA, 21 nt, synthetic construct
  misc_feature 1..21: note = HBV-targeting guide sequence portion
  source 1..21: mol_type = other RNA
aacctccaatcactcaccaac

SEQ ID NO: 6504 - RNA, 21 nt, synthetic construct
  misc_feature 1..21: note = HBV-targeting guide sequence portion
  source 1..21: mol_type = other RNA
aacctcctgtcctccaacttg

SEQ ID NO: 6505 - RNA, 21 nt, synthetic construct
  misc_feature 1..21: note = HBV-targeting guide sequence portion
  source 1..21: mol_type = other RNA
aacctctatgtatccctcctg

SEQ ID NO: 6506 - RNA, 21 nt, synthetic construct
  misc_feature 1..21: note = HBV-targeting guide sequence portion
  source 1..21: mol_type = other RNA
aacctgcacgactcctgctca

SEQ ID NO: 6507 - RNA, 21 nt, synthetic construct
  misc_feature 1..21: note = HBV-targeting guide sequence portion
  source 1..21: mol_type = other RNA
aaccttattatccagaacatc

SEQ ID NO: 6508 - RNA, 21 nt, synthetic construct
  misc_feature 1..21: note = HBV-targeting guide sequence portion
  source 1..21: mol_type = other RNA
aaccttccaccaaactctgca

SEQ ID NO: 6509 - RNA, 21 nt, synthetic construct
  misc_feature 1..21: note = HBV-targeting guide sequence portion
  source 1..21: mol_type = other RNA
aaccttcggatggaaactgca

SEQ ID NO: 6510 - RNA, 21 nt, synthetic construct
  misc_feature 1..21: note = HBV-targeting guide sequence portion
  source 1..21: mol_type = other RNA
aaccttgccagcaaatccgcc

SEQ ID NO: 6511 - RNA, 21 nt, synthetic construct
  misc_feature 1..21: note = HBV-targeting guide sequence portion
  source 1..21: mol_type = other RNA
aacctttaccccgttgccagg

SEQ ID NO: 6512 - RNA, 21 nt, synthetic construct
  misc_feature 1..21: note = HBV-targeting guide sequence portion
  source 1..21: mol_type = other RNA
aacctttccggctcctctgcc

SEQ ID NO: 6513 - RNA, 21 nt, synthetic construct
  misc_feature 1..21: note = HBV-targeting guide sequence portion
  source 1..21: mol_type = other RNA
aacgaattgtgggtcttctgg

SEQ ID NO: 6514 - RNA, 21 nt, synthetic construct
  misc_feature 1..21: note = HBV-targeting guide sequence portion
  source 1..21: mol_type = other RNA
aacgaccgaccttgaggcata

SEQ ID NO: 6515 - RNA, 21 nt, synthetic construct
  misc_feature 1..21: note = HBV-targeting guide sequence portion
  source 1..21: mol_type = other RNA
aacgagagtaactccacagta

SEQ ID NO: 6516 - RNA, 21 nt, synthetic construct
  misc_feature 1..21: note = HBV-targeting guide sequence portion
  source 1..21: mol_type = other RNA
aacgatgtatatttgcgggag

SEQ ID NO: 6517 - RNA, 21 nt, synthetic construct
  misc_feature 1..21: note = HBV-targeting guide sequence portion
  source 1..21: mol_type = other RNA
aacgcccaccaattcttgccc

SEQ ID NO: 6518 - RNA, 21 nt, synthetic construct
  misc_feature 1..21: note = HBV-targeting guide sequence portion
  source 1..21: mol_type = other RNA
aacgccgcagacacatccagc

SEQ ID NO: 6519 - RNA, 21 nt, synthetic construct
  misc_feature 1..21: note = HBV-targeting guide sequence portion
  source 1..21: mol_type = other RNA
aacggcaggcagagaagagga

SEQ ID NO: 6520 - RNA, 21 nt, synthetic construct
  misc_feature 1..21: note = HBV-targeting guide sequence portion
  source 1..21: mol_type = other RNA
aacggccaggtctgtgccaag

SEQ ID NO: 6521 - RNA, 21 nt, synthetic construct
  misc_feature 1..21: note = HBV-targeting guide sequence portion
  source 1..21: mol_type = other RNA
aacgggctgaggcccactccc

SEQ ID NO: 6522 - RNA, 21 nt, synthetic construct
  misc_feature 1..21: note = HBV-targeting guide sequence portion
  source 1..21: mol_type = other RNA
aacggggtaaaggttcaggta

SEQ ID NO: 6523 - RNA, 21 nt, synthetic construct
  misc_feature 1..21: note = HBV-targeting guide sequence portion
  source 1..21: mol_type = other RNA
aacggtcctagagtatttggt

SEQ ID NO: 6524 - RNA, 21 nt, synthetic construct
  misc_feature 1..21: note = HBV-targeting guide sequence portion
  source 1..21: mol_type = other RNA
aactaatgactctagctacct

SEQ ID NO: 6525 - RNA, 21 nt, synthetic construct
  misc_feature 1..21: note = HBV-targeting guide sequence portion
  source 1..21: mol_type = other RNA
aactaccgtgtgtcttggcca

SEQ ID NO: 6526 - RNA, 21 nt, synthetic construct
  misc_feature 1..21: note = HBV-targeting guide sequence portion
  source 1..21: mol_type = other RNA
aactagacactatttacacac

SEQ ID NO: 6527 - RNA, 21 nt, synthetic construct
  misc_feature 1..21: note = HBV-targeting guide sequence portion
  source 1..21: mol_type = other RNA
aactagatgttctggataata

SEQ ID NO: 6528 - RNA, 21 nt, synthetic construct
  misc_feature 1..21: note = HBV-targeting guide sequence portion
  source 1..21: mol_type = other RNA
aactattgtggtttcacattt

SEQ ID NO: 6529 - RNA, 21 nt, synthetic construct
  misc_feature 1..21: note = HBV-targeting guide sequence portion
  source 1..21: mol_type = other RNA
aactccaacaatccagattgg

SEQ ID NO: 6530 - RNA, 21 nt, synthetic construct
  misc_feature 1..21: note = HBV-targeting guide sequence portion
  source 1..21: mol_type = other RNA
aactccacaaccttccaccaa

SEQ ID NO: 6531 - RNA, 21 nt, synthetic construct
  misc_feature 1..21: note = HBV-targeting guide sequence portion
  source 1..21: mol_type = other RNA
aactccacagtagctccaaat

SEQ ID NO: 6532 - RNA, 21 nt, synthetic construct
  misc_feature 1..21: note = HBV-targeting guide sequence portion
  source 1..21: mol_type = other RNA
aactcccggttaacaggccta

SEQ ID NO: 6533 - RNA, 21 nt, synthetic construct
  misc_feature 1..21: note = HBV-targeting guide sequence portion
  source 1..21: mol_type = other RNA
aactccctcgcctcgcagacg

SEQ ID NO: 6534 - RNA, 21 nt, synthetic construct
  misc_feature 1..21: note = HBV-targeting guide sequence portion
  source 1..21: mol_type = other RNA
aactcctagccgcttgttttg

SEQ ID NO: 6535 - RNA, 21 nt, synthetic construct
  misc_feature 1..21: note = HBV-targeting guide sequence portion
  source 1..21: mol_type = other RNA
aactcctcccagtctttaaac

SEQ ID NO: 6536 - RNA, 21 nt, synthetic construct
  misc_feature 1..21: note = HBV-targeting guide sequence portion
  source 1..21: mol_type = other RNA
aactctgcaagatcccagagt

SEQ ID NO: 6537 - RNA, 21 nt, synthetic construct
  misc_feature 1..21: note = HBV-targeting guide sequence portion
  source 1..21: mol_type = other RNA
aactctgttgtcctctcccgc

SEQ ID NO: 6538 - RNA, 21 nt, synthetic construct
  misc_feature 1..21: note = HBV-targeting guide sequence portion
  source 1..21: mol_type = other RNA
aactgaaagccaaacagtggg

SEQ ID NO: 6539 - RNA, 21 nt, synthetic construct
  misc_feature 1..21: note = HBV-targeting guide sequence portion
  source 1..21: mol_type = other RNA
aactgactactaggtccctag

SEQ ID NO: 6540 - RNA, 21 nt, synthetic construct
  misc_feature 1..21: note = HBV-targeting guide sequence portion
  source 1..21: mol_type = other RNA
aactgagccaagagaaacggg

SEQ ID NO: 6541 - RNA, 21 nt, synthetic construct
  misc_feature 1..21: note = HBV-targeting guide sequence portion
  source 1..21: mol_type = other RNA
aactgcacctgtattcccatc

SEQ ID NO: 6542 - RNA, 21 nt, synthetic construct
  misc_feature 1..21: note = HBV-targeting guide sequence portion
  source 1..21: mol_type = other RNA
aactggagccaccagcaggga

SEQ ID NO: 6543 - RNA, 21 nt, synthetic construct
  misc_feature 1..21: note = HBV-targeting guide sequence portion
  source 1..21: mol_type = other RNA
aactggatcctgcgcgggacg

SEQ ID NO: 6544 - RNA, 21 nt, synthetic construct
  misc_feature 1..21: note = HBV-targeting guide sequence portion
  source 1..21: mol_type = other RNA
aactggtggtcgggaaagaat

SEQ ID NO: 6545 - RNA, 21 nt, synthetic construct
  misc_feature 1..21: note = HBV-targeting guide sequence portion
  source 1..21: mol_type = other RNA
aactgtaagcgggcctacaaa

SEQ ID NO: 6546 - RNA, 21 nt, synthetic construct
  misc_feature 1..21: note = HBV-targeting guide sequence portion
  source 1..21: mol_type = other RNA
aactgttcacattttttgata

SEQ ID NO: 6547 - RNA, 21 nt, synthetic construct
  misc_feature 1..21: note = HBV-targeting guide sequence portion
  source 1..21: mol_type = other RNA
aacttacaaggcctttctgtg

SEQ ID NO: 6548 - RNA, 21 nt, synthetic construct
  misc_feature 1..21: note = HBV-targeting guide sequence portion
  source 1..21: mol_type = other RNA
aacttgtcctggttatcgctg

SEQ ID NO: 6549 - RNA, 21 nt, synthetic construct
  misc_feature 1..21: note = HBV-targeting guide sequence portion
  source 1..21: mol_type = other RNA
aactttaggcccatatgagtg

SEQ ID NO: 6550 - RNA, 21 nt, synthetic construct
  misc_feature 1..21: note = HBV-targeting guide sequence portion
  source 1..21: mol_type = other RNA
aactttttcacctctgcctaa

SEQ ID NO: 6551 - RNA, 21 nt, synthetic construct
  misc_feature 1..21: note = HBV-targeting guide sequence portion
  source 1..21: mol_type = other RNA
aagaaaattggtaacagcggt

SEQ ID NO: 6552 - RNA, 21 nt, synthetic construct
  misc_feature 1..21: note = HBV-targeting guide sequence portion
  source 1..21: mol_type = other RNA
aagaaatgtgaaaccacaata

SEQ ID NO: 6553 - RNA, 21 nt, synthetic construct
  misc_feature 1..21: note = HBV-targeting guide sequence portion
  source 1..21: mol_type = other RNA
aagaaccaacaagaagatgag

SEQ ID NO: 6554 - RNA, 21 nt, synthetic construct
  misc_feature 1..21: note = HBV-targeting guide sequence portion
  source 1..21: mol_type = other RNA
aagaactccctcgcctcgcag

SEQ ID NO: 6555 - RNA, 21 nt, synthetic construct
  misc_feature 1..21: note = HBV-targeting guide sequence portion
  source 1..21: mol_type = other RNA
aagaagaactccctcgcctcg

SEQ ID NO: 6556 - RNA, 21 nt, synthetic construct
  misc_feature 1..21: note = HBV-targeting guide sequence portion
  source 1..21: mol_type = other RNA
aagaagatgaggcatagcagc

SEQ ID NO: 6557 - RNA, 21 nt, synthetic construct
  misc_feature 1..21: note = HBV-targeting guide sequence portion
  source 1..21: mol_type = other RNA
aagaagtcagaaggcaaaaac

SEQ ID NO: 6558 - RNA, 21 nt, synthetic construct
  misc_feature 1..21: note = HBV-targeting guide sequence portion
  source 1..21: mol_type = other RNA
aagaataaagccccgtaaaat

SEQ ID NO: 6559 - RNA, 21 nt, synthetic construct
  misc_feature 1..21: note = HBV-targeting guide sequence portion
  source 1..21: mol_type = other RNA
aagaatatggtgacccacaga

SEQ ID NO: 6560 - RNA, 21 nt, synthetic construct
  misc_feature 1..21: note = HBV-targeting guide sequence portion
  source 1..21: mol_type = other RNA
aagaatcccagaggattgctg

SEQ ID NO: 6561 - RNA, 21 nt, synthetic construct
  misc_feature 1..21: note = HBV-targeting guide sequence portion
  source 1..21: mol_type = other RNA
aagaatcctcacaataccgca

SEQ ID NO: 6562 - RNA, 21 nt, synthetic construct
  misc_feature 1..21: note = HBV-targeting guide sequence portion
  source 1..21: mol_type = other RNA
aagaatgtttcagaaaactcc

SEQ ID NO: 6563 - RNA, 21 nt, synthetic construct
  misc_feature 1..21: note = HBV-targeting guide sequence portion
  source 1..21: mol_type = other RNA
aagaattgcttgcctgagtgc

SEQ ID NO: 6564 - RNA, 21 nt, synthetic construct
  misc_feature 1..21: note = HBV-targeting guide sequence portion
  source 1..21: mol_type = other RNA
aagaattggtgggcgttcacg

SEQ ID NO: 6565 - RNA, 21 nt, synthetic construct
  misc_feature 1..21: note = HBV-targeting guide sequence portion
  source 1..21: mol_type = other RNA
aagaatttggagctactgtgg

SEQ ID NO: 6566 - RNA, 21 nt, synthetic construct
  misc_feature 1..21: note = HBV-targeting guide sequence portion
  source 1..21: mol_type = other RNA
aagacaaaagaaaattggtaa

SEQ ID NO: 6567 - RNA, 21 nt, synthetic construct
  misc_feature 1..21: note = HBV-targeting guide sequence portion
  source 1..21: mol_type = other RNA
aagacaagaaatgtgaaacca

SEQ ID NO: 6568 - RNA, 21 nt, synthetic construct
  misc_feature 1..21: note = HBV-targeting guide sequence portion
  source 1..21: mol_type = other RNA
aagacacacggtagttccccc

SEQ ID NO: 6569 - RNA, 21 nt, synthetic construct
  misc_feature 1..21: note = HBV-targeting guide sequence portion
  source 1..21: mol_type = other RNA
aagacaccaaatactctagga

SEQ ID NO: 6570 - RNA, 21 nt, synthetic construct
  misc_feature 1..21: note = HBV-targeting guide sequence portion
  source 1..21: mol_type = other RNA
aagacaggtacagtagaagaa

SEQ ID NO: 6571 - RNA, 21 nt, synthetic construct
  misc_feature 1..21: note = HBV-targeting guide sequence portion
  source 1..21: mol_type = other RNA
aagacccacaattcgttgaca

SEQ ID NO: 6572 - RNA, 21 nt, synthetic construct
  misc_feature 1..21: note = HBV-targeting guide sequence portion
  source 1..21: mol_type = other RNA
aagaccttgggcaagaattgg

SEQ ID NO: 6573 - RNA, 21 nt, synthetic construct
  misc_feature 1..21: note = HBV-targeting guide sequence portion
  source 1..21: mol_type = other RNA
aagacggttgaaattgattat

SEQ ID NO: 6574 - RNA, 21 nt, synthetic construct
  misc_feature 1..21: note = HBV-targeting guide sequence portion
  source 1..21: mol_type = other RNA
aagactgggaggagttggggg

SEQ ID NO: 6575 - RNA, 21 nt, synthetic construct
  misc_feature 1..21: note = HBV-targeting guide sequence portion
  source 1..21: mol_type = other RNA
aagactgtttgtttaaagact

SEQ ID NO: 6576 - RNA, 21 nt, synthetic construct
  misc_feature 1..21: note = HBV-targeting guide sequence portion
  source 1..21: mol_type = other RNA
aagagaaacgggctgaggccc

SEQ ID NO: 6577 - RNA, 21 nt, synthetic construct
  misc_feature 1..21: note = HBV-targeting guide sequence portion
  source 1..21: mol_type = other RNA
aagagaaacggtcctagagta

SEQ ID NO: 6578 - RNA, 21 nt, synthetic construct
  misc_feature 1..21: note = HBV-targeting guide sequence portion
  source 1..21: mol_type = other RNA
aagagaataaccccatctctt

SEQ ID NO: 6579 - RNA, 21 nt, synthetic construct
  misc_feature 1..21: note = HBV-targeting guide sequence portion
  source 1..21: mol_type = other RNA
aagagaggtgcgccccgtggt

SEQ ID NO: 6580 - RNA, 21 nt, synthetic construct
  misc_feature 1..21: note = HBV-targeting guide sequence portion
  source 1..21: mol_type = other RNA
aagagagtgtcaacacatagc

SEQ ID NO: 6581 - RNA, 21 nt, synthetic construct
  misc_feature 1..21: note = HBV-targeting guide sequence portion
  source 1..21: mol_type = other RNA
aagagatgattaggcagaggt

SEQ ID NO: 6582 - RNA, 21 nt, synthetic construct
  misc_feature 1..21: note = HBV-targeting guide sequence portion
  source 1..21: mol_type = other RNA
aagagatggggttattctctt

SEQ ID NO: 6583 - RNA, 21 nt, synthetic construct
  misc_feature 1..21: note = HBV-targeting guide sequence portion
  source 1..21: mol_type = other RNA
aagagctacagcatggggcag

SEQ ID NO: 6584 - RNA, 21 nt, synthetic construct
  misc_feature 1..21: note = HBV-targeting guide sequence portion
  source 1..21: mol_type = other RNA
aagaggaagatgataaaacgc

SEQ ID NO: 6585 - RNA, 21 nt, synthetic construct
  misc_feature 1..21: note = HBV-targeting guide sequence portion
  source 1..21: mol_type = other RNA
aagaggacgacagggccccaa

SEQ ID NO: 6586 - RNA, 21 nt, synthetic construct
  misc_feature 1..21: note = HBV-targeting guide sequence portion
  source 1..21: mol_type = other RNA
aagaggactcttggactctct

SEQ ID NO: 6587 - RNA, 21 nt, synthetic construct
  misc_feature 1..21: note = HBV-targeting guide sequence portion
  source 1..21: mol_type = other RNA
aagagggtgttttccaatgag

SEQ ID NO: 6588 - RNA, 21 nt, synthetic construct
  misc_feature 1..21: note = HBV-targeting guide sequence portion
  source 1..21: mol_type = other RNA
aagagtcctcttatgtaagac

SEQ ID NO: 6589 - RNA, 21 nt, synthetic construct
  misc_feature 1..21: note = HBV-targeting guide sequence portion
  source 1..21: mol_type = other RNA
aagatattatcaaaaaatgtg

SEQ ID NO: 6590 - RNA, 21 nt, synthetic construct
  misc_feature 1..21: note = HBV-targeting guide sequence portion
  source 1..21: mol_type = other RNA
aagatcaagcatctagggacc

SEQ ID NO: 6591 - RNA, 21 nt, synthetic construct
  misc_feature 1..21: note = HBV-targeting guide sequence portion
  source 1..21: mol_type = other RNA
aagatcattaatctaatctcc

SEQ ID NO: 6592 - RNA, 21 nt, synthetic construct
  misc_feature 1..21: note = HBV-targeting guide sequence portion
  source 1..21: mol_type = other RNA
aagatcccagagtgagaggcc

SEQ ID NO: 6593 - RNA, 21 nt, synthetic construct
  misc_feature 1..21: note = HBV-targeting guide sequence portion
  source 1..21: mol_type = other RNA
aagatctcaatcgccgcgtcg

SEQ ID NO: 6594 - RNA, 21 nt, synthetic construct
  misc_feature 1..21: note = HBV-targeting guide sequence portion
  source 1..21: mol_type = other RNA
aagatctcaatctcggggatc

SEQ ID NO: 6595 - RNA, 21 nt, synthetic construct
  misc_feature 1..21: note = HBV-targeting guide sequence portion
  source 1..21: mol_type = other RNA
aagatctcgtacggaaggaaa

SEQ ID NO: 6596 - RNA, 21 nt, synthetic construct
  misc_feature 1..21: note = HBV-targeting guide sequence portion
  source 1..21: mol_type = other RNA
aagatgaggcatagcagcagg

SEQ ID NO: 6597 - RNA, 21 nt, synthetic construct
  misc_feature 1..21: note = HBV-targeting guide sequence portion
  source 1..21: mol_type = other RNA
aagatgataaaacgccgcaga

SEQ ID NO: 6598 - RNA, 21 nt, synthetic construct
  misc_feature 1..21: note = HBV-targeting guide sequence portion
  source 1..21: mol_type = other RNA
aagatgctgtacagacttggc

SEQ ID NO: 6599 - RNA, 21 nt, synthetic construct
  misc_feature 1..21: note = HBV-targeting guide sequence portion
  source 1..21: mol_type = other RNA
aagattctgccccatgctgta

SEQ ID NO: 6600 - RNA, 21 nt, synthetic construct
  misc_feature 1..21: note = HBV-targeting guide sequence portion
  source 1..21: mol_type = other RNA
aagattgacgatatgtgagag

SEQ ID NO: 6601 - RNA, 21 nt, synthetic construct
  misc_feature 1..21: note = HBV-targeting guide sequence portion
  source 1..21: mol_type = other RNA
aagcaattctttgctggggag

SEQ ID NO: 6602 - RNA, 21 nt, synthetic construct
  misc_feature 1..21: note = HBV-targeting guide sequence portion
  source 1..21: mol_type = other RNA
aagcaggataaccacattgtg

SEQ ID NO: 6603 - RNA, 21 nt, synthetic construct
  misc_feature 1..21: note = HBV-targeting guide sequence portion
  source 1..21: mol_type = other RNA
aagcaggctttcactttttcg

SEQ ID NO: 6604 - RNA, 21 nt, synthetic construct
  misc_feature 1..21: note = HBV-targeting guide sequence portion
  source 1..21: mol_type = other RNA
aagcatctagggacctagtag

SEQ ID NO: 6605 - RNA, 21 nt, synthetic construct
  misc_feature 1..21: note = HBV-targeting guide sequence portion
  source 1..21: mol_type = other RNA
aagccaaacagtgggggaaag

SEQ ID NO: 6606 - RNA, 21 nt, synthetic construct
  misc_feature 1..21: note = HBV-targeting guide sequence portion
  source 1..21: mol_type = other RNA
aagccacccaaggcacagctt

SEQ ID NO: 6607 - RNA, 21 nt, synthetic construct
  misc_feature 1..21: note = HBV-targeting guide sequence portion
  source 1..21: mol_type = other RNA
aagcccaggatgatgggatgg

SEQ ID NO: 6608 - RNA, 21 nt, synthetic construct
  misc_feature 1..21: note = HBV-targeting guide sequence portion
  source 1..21: mol_type = other RNA
aagccccaaccagtgggggtt

SEQ ID NO: 6609 - RNA, 21 nt, synthetic construct
  misc_feature 1..21: note = HBV-targeting guide sequence portion
  source 1..21: mol_type = other RNA
aagccccgtaaaatttcccac

SEQ ID NO: 6610 - RNA, 21 nt, synthetic construct
  misc_feature 1..21: note = HBV-targeting guide sequence portion
  source 1..21: mol_type = other RNA
aagccctacgaaccactgaac

SEQ ID NO: 6611 - RNA, 21 nt, synthetic construct
  misc_feature 1..21: note = HBV-targeting guide sequence portion
  source 1..21: mol_type = other RNA
aagcctccaagctgtgccttg

SEQ ID NO: 6612 - RNA, 21 nt, synthetic construct
  misc_feature 1..21: note = HBV-targeting guide sequence portion
  source 1..21: mol_type = other RNA
aagcctgcttagattgaatac

SEQ ID NO: 6613 - RNA, 21 nt, synthetic construct
  misc_feature 1..21: note = HBV-targeting guide sequence portion
  source 1..21: mol_type = other RNA
aagcgaagtgcacacggtccg

SEQ ID NO: 6614 - RNA, 21 nt, synthetic construct
  misc_feature 1..21: note = HBV-targeting guide sequence portion
  source 1..21: mol_type = other RNA
aagcggcctcgagatgggtcg

SEQ ID NO: 6615 - RNA, 21 nt, synthetic construct
  misc_feature 1..21: note = HBV-targeting guide sequence portion
  source 1..21: mol_type = other RNA
aagcggctaggagttccgcag

SEQ ID NO: 6616 - RNA, 21 nt, synthetic construct
  misc_feature 1..21: note = HBV-targeting guide sequence portion
  source 1..21: mol_type = other RNA
aagcgggcctacaaactgttc

SEQ ID NO: 6617 - RNA, 21 nt, synthetic construct
  misc_feature 1..21: note = HBV-targeting guide sequence portion
  source 1..21: mol_type = other RNA
aagctggaggagtgcgaatcc

SEQ ID NO: 6618 - RNA, 21 nt, synthetic construct
  misc_feature 1..21: note = HBV-targeting guide sequence portion
  source 1..21: mol_type = other RNA
aagctgtgccttgggtggctt

SEQ ID NO: 6619 - RNA, 21 nt, synthetic construct
  misc_feature 1..21: note = HBV-targeting guide sequence portion
  source 1..21: mol_type = other RNA
aaggaaaaccccgcctgtaac

SEQ ID NO: 6620 - RNA, 21 nt, synthetic construct
  misc_feature 1..21: note = HBV-targeting guide sequence portion
  source 1..21: mol_type = other RNA
aaggaaagaagtcagaaggca

SEQ ID NO: 6621 - RNA, 21 nt, synthetic construct
  misc_feature 1..21: note = HBV-targeting guide sequence portion
  source 1..21: mol_type = other RNA
aaggaacctctatgtatccct

SEQ ID NO: 6622 - RNA, 21 nt, synthetic construct
  misc_feature 1..21: note = HBV-targeting guide sequence portion
  source 1..21: mol_type = other RNA
aaggacgtcccgcgcaggatc

SEQ ID NO: 6623 - RNA, 21 nt, synthetic construct
  misc_feature 1..21: note = HBV-targeting guide sequence portion
  source 1..21: mol_type = other RNA
aaggatccctggccagacgcc

SEQ ID NO: 6624 - RNA, 21 nt, synthetic construct
  misc_feature 1..21: note = HBV-targeting guide sequence portion
  source 1..21: mol_type = other RNA
aaggcaaaaacgagagtaact

SEQ ID NO: 6625 - RNA, 21 nt, synthetic construct
  misc_feature 1..21: note = HBV-targeting guide sequence portion
  source 1..21: mol_type = other RNA
aaggcacagacggggagtccg

SEQ ID NO: 6626 - RNA, 21 nt, synthetic construct
  misc_feature 1..21: note = HBV-targeting guide sequence portion
  source 1..21: mol_type = other RNA
aaggcacagcttggaggcttg

SEQ ID NO: 6627 - RNA, 21 nt, synthetic construct
  misc_feature 1..21: note = HBV-targeting guide sequence portion
  source 1..21: mol_type = other RNA
aaggcatcccgatacagagct

SEQ ID NO: 6628 - RNA, 21 nt, synthetic construct
  misc_feature 1..21: note = HBV-targeting guide sequence portion
  source 1..21: mol_type = other RNA
aaggcctccgtgcggtggggt

SEQ ID NO: 6629 - RNA, 21 nt, synthetic construct
  misc_feature 1..21: note = HBV-targeting guide sequence portion
  source 1..21: mol_type = other RNA
aaggccttgtaagttggcgaa

SEQ ID NO: 6630 - RNA, 21 nt, synthetic construct
  misc_feature 1..21: note = HBV-targeting guide sequence portion
  source 1..21: mol_type = other RNA
aaggcctttctgtgtaaacaa

SEQ ID NO: 6631 - RNA, 21 nt, synthetic construct
  misc_feature 1..21: note = HBV-targeting guide sequence portion
  source 1..21: mol_type = other RNA
aaggcgggtgttttatataag

SEQ ID NO: 6632 - RNA, 21 nt, synthetic construct
  misc_feature 1..21: note = HBV-targeting guide sequence portion
  source 1..21: mol_type = other RNA
aaggctgggtccaactggtgg

SEQ ID NO: 6633 - RNA, 21 nt, synthetic construct
  misc_feature 1..21: note = HBV-targeting guide sequence portion
  source 1..21: mol_type = other RNA
aagggactcaagatgctgtac

SEQ ID NO: 6634 - RNA, 21 nt, synthetic construct
  misc_feature 1..21: note = HBV-targeting guide sequence portion
  source 1..21: mol_type = other RNA
aagggatactaacattgagat

SEQ ID NO: 6635 - RNA, 21 nt, synthetic construct
  misc_feature 1..21: note = HBV-targeting guide sequence portion
  source 1..21: mol_type = other RNA
aagggcaagtatttggtgaat

SEQ ID NO: 6636 - RNA, 21 nt, synthetic construct
  misc_feature 1..21: note = HBV-targeting guide sequence portion
  source 1..21: mol_type = other RNA
aagggcattaaagcaggataa

SEQ ID NO: 6637 - RNA, 21 nt, synthetic construct
  misc_feature 1..21: note = HBV-targeting guide sequence portion
  source 1..21: mol_type = other RNA
aaggggcagcaaaacccagaa

SEQ ID NO: 6638 - RNA, 21 nt, synthetic construct
  misc_feature 1..21: note = HBV-targeting guide sequence portion
  source 1..21: mol_type = other RNA
aagggtattaaaccttattat

SEQ ID NO: 6639 - RNA, 21 nt, synthetic construct
  misc_feature 1..21: note = HBV-targeting guide sequence portion
  source 1..21: mol_type = other RNA
aaggtaggagctggagcattc

SEQ ID NO: 6640 - RNA, 21 nt, synthetic construct
  misc_feature 1..21: note = HBV-targeting guide sequence portion
  source 1..21: mol_type = other RNA
aaggtatgtttcccgtctgtc

SEQ ID NO: 6641 - RNA, 21 nt, synthetic construct
  misc_feature 1..21: note = HBV-targeting guide sequence portion
  source 1..21: mol_type = other RNA
aaggtcggtcgttgacattgc

SEQ ID NO: 6642 - RNA, 21 nt, synthetic construct
  misc_feature 1..21: note = HBV-targeting guide sequence portion
  source 1..21: mol_type = other RNA
aaggtcttacataagaggact

SEQ ID NO: 6643 - RNA, 21 nt, synthetic construct
  misc_feature 1..21: note = HBV-targeting guide sequence portion
  source 1..21: mol_type = other RNA
aaggtgggaaattttacgggg

SEQ ID NO: 6644 - RNA, 21 nt, synthetic construct
  misc_feature 1..21: note = HBV-targeting guide sequence portion
  source 1..21: mol_type = other RNA
aaggttcaggtattgtttaca

SEQ ID NO: 6645 - RNA, 21 nt, synthetic construct
  misc_feature 1..21: note = HBV-targeting guide sequence portion
  source 1..21: mol_type = other RNA
aaggttccacgcatgcgctga

SEQ ID NO: 6646 - RNA, 21 nt, synthetic construct
  misc_feature 1..21: note = HBV-targeting guide sequence portion
  source 1..21: mol_type = other RNA
aaggtttaatacccttatcca

SEQ ID NO: 6647 - RNA, 21 nt, synthetic construct
  misc_feature 1..21: note = HBV-targeting guide sequence portion
  source 1..21: mol_type = other RNA
aaggtttgcattatgccctga

SEQ ID NO: 6648 - RNA, 21 nt, synthetic construct
  misc_feature 1..21: note = HBV-targeting guide sequence portion
  source 1..21: mol_type = other RNA
aaggttttgtacagcaacagg

SEQ ID NO: 6649 - RNA, 21 nt, synthetic construct
  misc_feature 1..21: note = HBV-targeting guide sequence portion
  source 1..21: mol_type = other RNA
aagtaagacaagaaatgtgaa

SEQ ID NO: 6650 - RNA, 21 nt, synthetic construct
  misc_feature 1..21: note = HBV-targeting guide sequence portion
  source 1..21: mol_type = other RNA
aagtaatgattaactagatgt

SEQ ID NO: 6651 - RNA, 21 nt, synthetic construct
  misc_feature 1..21: note = HBV-targeting guide sequence portion
  source 1..21: mol_type = other RNA
aagtatgcctcaaggtcggtc

SEQ ID NO: 6652 - RNA, 21 nt, synthetic construct
  misc_feature 1..21: note = HBV-targeting guide sequence portion
  source 1..21: mol_type = other RNA
aagtatttggtgaatttagga

SEQ ID NO: 6653 - RNA, 21 nt, synthetic construct
  misc_feature 1..21: note = HBV-targeting guide sequence portion
  source 1..21: mol_type = other RNA
aagtcagaaggcaaaaacgag

SEQ ID NO: 6654 - RNA, 21 nt, synthetic construct
  misc_feature 1..21: note = HBV-targeting guide sequence portion
  source 1..21: mol_type = other RNA
aagtccaccacgagtctagac

SEQ ID NO: 6655 - RNA, 21 nt, synthetic construct
  misc_feature 1..21: note = HBV-targeting guide sequence portion
  source 1..21: mol_type = other RNA
aagtcccaatctggattgttg

SEQ ID NO: 6656 - RNA, 21 nt, synthetic construct
  misc_feature 1..21: note = HBV-targeting guide sequence portion
  source 1..21: mol_type = other RNA
aagtctccggaagtgttgata

SEQ ID NO: 6657 - RNA, 21 nt, synthetic construct
  misc_feature 1..21: note = HBV-targeting guide sequence portion
  source 1..21: mol_type = other RNA
aagtctgtacagcatcttgag

SEQ ID NO: 6658 - RNA, 21 nt, synthetic construct
  misc_feature 1..21: note = HBV-targeting guide sequence portion
  source 1..21: mol_type = other RNA
aagtgaaagcctgcttagatt

SEQ ID NO: 6659 - RNA, 21 nt, synthetic construct
  misc_feature 1..21: note = HBV-targeting guide sequence portion
  source 1..21: mol_type = other RNA
aagtgcacacggtccggcaga

SEQ ID NO: 6660 - RNA, 21 nt, synthetic construct
  misc_feature 1..21: note = HBV-targeting guide sequence portion
  source 1..21: mol_type = other RNA
aagtgtgtcaacgaattgtgg

SEQ ID NO: 6661 - RNA, 21 nt, synthetic construct
  misc_feature 1..21: note = HBV-targeting guide sequence portion
  source 1..21: mol_type = other RNA
aagtgttgataggataggggc

SEQ ID NO: 6662 - RNA, 21 nt, synthetic construct
  misc_feature 1..21: note = HBV-targeting guide sequence portion
  source 1..21: mol_type = other RNA
aagtgtttgctgatgcaaccc

SEQ ID NO: 6663 - RNA, 21 nt, synthetic construct
  misc_feature 1..21: note = HBV-targeting guide sequence portion
  source 1..21: mol_type = other RNA
aagttcagacaactattgtgg

SEQ ID NO: 6664 - RNA, 21 nt, synthetic construct
  misc_feature 1..21: note = HBV-targeting guide sequence portion
  source 1..21: mol_type = other RNA
aagttgcatggtgctggtgcg

SEQ ID NO: 6665 - RNA, 21 nt, synthetic construct
  misc_feature 1..21: note = HBV-targeting guide sequence portion
  source 1..21: mol_type = other RNA
aagttggaggacaggaggttg

SEQ ID NO: 6666 - RNA, 21 nt, synthetic construct
  misc_feature 1..21: note = HBV-targeting guide sequence portion
  source 1..21: mol_type = other RNA
aagttggcgaaaaagtgaaag

SEQ ID NO: 6667 - RNA, 21 nt, synthetic construct
  misc_feature 1..21: note = HBV-targeting guide sequence portion
  source 1..21: mol_type = other RNA
aataaagccccgtaaaatttc

SEQ ID NO: 6668 - RNA, 21 nt, synthetic construct
  misc_feature 1..21: note = HBV-targeting guide sequence portion
  source 1..21: mol_type = other RNA
aataaccccatctctttgttt

SEQ ID NO: 6669 - RNA, 21 nt, synthetic construct
  misc_feature 1..21: note = HBV-targeting guide sequence portion
  source 1..21: mol_type = other RNA
aataaggtttaatacccttat

SEQ ID NO: 6670 - RNA, 21 nt, synthetic construct
  misc_feature 1..21: note = HBV-targeting guide sequence portion
  source 1..21: mol_type = other RNA
aatacaggtgcagtttccatc

SEQ ID NO: 6671 - RNA, 21 nt, synthetic construct
  misc_feature 1..21: note = HBV-targeting guide sequence portion
  source 1..21: mol_type = other RNA
aatacatgcatacaagggcat

SEQ ID NO: 6672 - RNA, 21 nt, synthetic construct
  misc_feature 1..21: note = HBV-targeting guide sequence portion
  source 1..21: mol_type = other RNA
aataccacatcatccatataa

SEQ ID NO: 6673 - RNA, 21 nt, synthetic construct
  misc_feature 1..21: note = HBV-targeting guide sequence portion
  source 1..21: mol_type = other RNA
aatacccttatccaagggcaa

SEQ ID NO: 6674 - RNA, 21 nt, synthetic construct
  misc_feature 1..21: note = HBV-targeting guide sequence portion
  source 1..21: mol_type = other RNA
aataccgcagagtctagactc

SEQ ID NO: 6675 - RNA, 21 nt, synthetic construct
  misc_feature 1..21: note = HBV-targeting guide sequence portion
  source 1..21: mol_type = other RNA
aatacctgaacctttaccccg

SEQ ID NO: 6676 - RNA, 21 nt, synthetic construct
  misc_feature 1..21: note = HBV-targeting guide sequence portion
  source 1..21: mol_type = other RNA
aatactctaggaccgtttctc

SEQ ID NO: 6677 - RNA, 21 nt, synthetic construct
  misc_feature 1..21: note = HBV-targeting guide sequence portion
  source 1..21: mol_type = other RNA
aatacttgcccttggataagg

SEQ ID NO: 6678 - RNA, 21 nt, synthetic construct
  misc_feature 1..21: note = HBV-targeting guide sequence portion
  source 1..21: mol_type = other RNA
aataggcctgttaaccgggag

SEQ ID NO: 6679 - RNA, 21 nt, synthetic construct
  misc_feature 1..21: note = HBV-targeting guide sequence portion
  source 1..21: mol_type = other RNA
aatagtgtctagtttggaagt

SEQ ID NO: 6680 - RNA, 21 nt, synthetic construct
  misc_feature 1..21: note = HBV-targeting guide sequence portion
  source 1..21: mol_type = other RNA
aatagttgtctgaactttagg

SEQ ID NO: 6681 - RNA, 21 nt, synthetic construct
  misc_feature 1..21: note = HBV-targeting guide sequence portion
  source 1..21: mol_type = other RNA
aatatacatcgttcccatggc

SEQ ID NO: 6682 - RNA, 21 nt, synthetic construct
  misc_feature 1..21: note = HBV-targeting guide sequence portion
  source 1..21: mol_type = other RNA
aatatacatctacaccaagat

SEQ ID NO: 6683 - RNA, 21 nt, synthetic construct
  misc_feature 1..21: note = HBV-targeting guide sequence portion
  source 1..21: mol_type = other RNA
aatatcttggtgtagatgtat

SEQ ID NO: 6684 - RNA, 21 nt, synthetic construct
  misc_feature 1..21: note = HBV-targeting guide sequence portion
  source 1..21: mol_type = other RNA
aatatggtgacccacagaatg

SEQ ID NO: 6685 - RNA, 21 nt, synthetic construct
  misc_feature 1..21: note = HBV-targeting guide sequence portion
  source 1..21: mol_type = other RNA
aatcaaagaatgtttcagaaa

SEQ ID NO: 6686 - RNA, 21 nt, synthetic construct
  misc_feature 1..21: note = HBV-targeting guide sequence portion
  source 1..21: mol_type = other RNA
aatcaataggcctgttaaccg

SEQ ID NO: 6687 - RNA, 21 nt, synthetic construct
  misc_feature 1..21: note = HBV-targeting guide sequence portion
  source 1..21: mol_type = other RNA
aatcaatgacatagcccatga

SEQ ID NO: 6688 - RNA, 21 nt, synthetic construct
  misc_feature 1..21: note = HBV-targeting guide sequence portion
  source 1..21: mol_type = other RNA
aatcaatttcaaccgtctttt

SEQ ID NO: 6689 - RNA, 21 nt, synthetic construct
  misc_feature 1..21: note = HBV-targeting guide sequence portion
  source 1..21: mol_type = other RNA
aatcacatcatacacaaaatc

SEQ ID NO: 6690 - RNA, 21 nt, synthetic construct
  misc_feature 1..21: note = HBV-targeting guide sequence portion
  source 1..21: mol_type = other RNA
aatcactcaccaacctcctgt

SEQ ID NO: 6691 - RNA, 21 nt, synthetic construct
  misc_feature 1..21: note = HBV-targeting guide sequence portion
  source 1..21: mol_type = other RNA
aatcatctcttgttcatgtcc

SEQ ID NO: 6692 - RNA, 21 nt, synthetic construct
  misc_feature 1..21: note = HBV-targeting guide sequence portion
  source 1..21: mol_type = other RNA
aatcattacttccaaactaga

SEQ ID NO: 6693 - RNA, 21 nt, synthetic construct
  misc_feature 1..21: note = HBV-targeting guide sequence portion
  source 1..21: mol_type = other RNA
aatccacactccaaaagacac

SEQ ID NO: 6694 - RNA, 21 nt, synthetic construct
  misc_feature 1..21: note = HBV-targeting guide sequence portion
  source 1..21: mol_type = other RNA
aatccagattgggacttcaat

SEQ ID NO: 6695 - RNA, 21 nt, synthetic construct
  misc_feature 1..21: note = HBV-targeting guide sequence portion
  source 1..21: mol_type = other RNA
aatcccaacaaggatccctgg

SEQ ID NO: 6696 - RNA, 21 nt, synthetic construct
  misc_feature 1..21: note = HBV-targeting guide sequence portion
  source 1..21: mol_type = other RNA
aatcccagaggattgctggtg

SEQ ID NO: 6697 - RNA, 21 nt, synthetic construct
  misc_feature 1..21: note = HBV-targeting guide sequence portion
  source 1..21: mol_type = other RNA
aatcccgcggacgacccatct

SEQ ID NO: 6698 - RNA, 21 nt, synthetic construct
  misc_feature 1..21: note = HBV-targeting guide sequence portion
  source 1..21: mol_type = other RNA
aatccgcctcctgcctctacc

SEQ ID NO: 6699 - RNA, 21 nt, synthetic construct
  misc_feature 1..21: note = HBV-targeting guide sequence portion
  source 1..21: mol_type = other RNA
aatcctcacaataccgcagag

SEQ ID NO: 6700 - RNA, 21 nt, synthetic construct
  misc_feature 1..21: note = HBV-targeting guide sequence portion
  source 1..21: mol_type = other RNA
aatcctcgagaagattgacga

SEQ ID NO: 6701 - RNA, 21 nt, synthetic construct
  misc_feature 1..21: note = HBV-targeting guide sequence portion
  source 1..21: mol_type = other RNA
aatcctctgggattctttccc

SEQ ID NO: 6702 - RNA, 21 nt, synthetic construct
  misc_feature 1..21: note = HBV-targeting guide sequence portion
  source 1..21: mol_type = other RNA
aatcctgatgtgatgttctcc

SEQ ID NO: 6703 - RNA, 21 nt, synthetic construct
  misc_feature 1..21: note = HBV-targeting guide sequence portion
  source 1..21: mol_type = other RNA
aatcgccagtcaggacggcag

SEQ ID NO: 6704 - RNA, 21 nt, synthetic construct
  misc_feature 1..21: note = HBV-targeting guide sequence portion
  source 1..21: mol_type = other RNA
aatcgccgcgtcgcagaagat

SEQ ID NO: 6705 - RNA, 21 nt, synthetic construct
  misc_feature 1..21: note = HBV-targeting guide sequence portion
  source 1..21: mol_type = other RNA
aatctaagcaggctttcactt

SEQ ID NO: 6706 - RNA, 21 nt, synthetic construct
  misc_feature 1..21: note = HBV-targeting guide sequence portion
  source 1..21: mol_type = other RNA
aatctaatctcctcccccaac

SEQ ID NO: 6707 - RNA, 21 nt, synthetic construct
  misc_feature 1..21: note = HBV-targeting guide sequence portion
  source 1..21: mol_type = other RNA
aatctcctcccccaactcctc

SEQ ID NO: 6708 - RNA, 21 nt, synthetic construct
  misc_feature 1..21: note = HBV-targeting guide sequence portion
  source 1..21: mol_type = other RNA
aatctcggggatctcaatgtt

SEQ ID NO: 6709 - RNA, 21 nt, synthetic construct
  misc_feature 1..21: note = HBV-targeting guide sequence portion
  source 1..21: mol_type = other RNA
aatctggattgttggagtttg

SEQ ID NO: 6710 - RNA, 21 nt, synthetic construct
  misc_feature 1..21: note = HBV-targeting guide sequence portion
  source 1..21: mol_type = other RNA
aatcttctcgaggattgggga

SEQ ID NO: 6711 - RNA, 21 nt, synthetic construct
  misc_feature 1..21: note = HBV-targeting guide sequence portion
  source 1..21: mol_type = other RNA
aatctttccaccagcaatcct

SEQ ID NO: 6712 - RNA, 21 nt, synthetic construct
  misc_feature 1..21: note = HBV-targeting guide sequence portion
  source 1..21: mol_type = other RNA
aatgacatagcccatgaaatt

SEQ ID NO: 6713 - RNA, 21 nt, synthetic construct
  misc_feature 1..21: note = HBV-targeting guide sequence portion
  source 1..21: mol_type = other RNA
aatgactctagctacctgggt

SEQ ID NO: 6714 - RNA, 21 nt, synthetic construct
  misc_feature 1..21: note = HBV-targeting guide sequence portion
  source 1..21: mol_type = other RNA
aatgagaaaagacggttgaaa

SEQ ID NO: 6715 - RNA, 21 nt, synthetic construct
  misc_feature 1..21: note = HBV-targeting guide sequence portion
  source 1..21: mol_type = other RNA
aatgaggcgctatgtgttgac

SEQ ID NO: 6716 - RNA, 21 nt, synthetic construct
  misc_feature 1..21: note = HBV-targeting guide sequence portion
  source 1..21: mol_type = other RNA
aatgagggttaaagacaggta

SEQ ID NO: 6717 - RNA, 21 nt, synthetic construct
  misc_feature 1..21: note = HBV-targeting guide sequence portion
  source 1..21: mol_type = other RNA
aatgatccccaacaatcaatg

SEQ ID NO: 6718 - RNA, 21 nt, synthetic construct
  misc_feature 1..21: note = HBV-targeting guide sequence portion
  source 1..21: mol_type = other RNA
aatgatctttgtactaggagg

SEQ ID NO: 6719 - RNA, 21 nt, synthetic construct
  misc_feature 1..21: note = HBV-targeting guide sequence portion
  source 1..21: mol_type = other RNA
aatgattaactagatgttctg

SEQ ID NO: 6720 - RNA, 21 nt, synthetic construct
  misc_feature 1..21: note = HBV-targeting guide sequence portion
  source 1..21: mol_type = other RNA
aatgcaaaccttgccagcaaa

SEQ ID NO: 6721 - RNA, 21 nt, synthetic construct
  misc_feature 1..21: note = HBV-targeting guide sequence portion
  source 1..21: mol_type = other RNA
aatgcccctatcctatcaaca

SEQ ID NO: 6722 - RNA, 21 nt, synthetic construct
  misc_feature 1..21: note = HBV-targeting guide sequence portion
  source 1..21: mol_type = other RNA
aatgcccttgtatgcatgtat

SEQ ID NO: 6723 - RNA, 21 nt, synthetic construct
  misc_feature 1..21: note = HBV-targeting guide sequence portion
  source 1..21: mol_type = other RNA
aatgctcaggagactccaagg

SEQ ID NO: 6724 - RNA, 21 nt, synthetic construct
  misc_feature 1..21: note = HBV-targeting guide sequence portion
  source 1..21: mol_type = other RNA
aatgctccagctcctaccttg

SEQ ID NO: 6725 - RNA, 21 nt, synthetic construct
  misc_feature 1..21: note = HBV-targeting guide sequence portion
  source 1..21: mol_type = other RNA
aatggcactagtaaactgagc

SEQ ID NO: 6726 - RNA, 21 nt, synthetic construct
  misc_feature 1..21: note = HBV-targeting guide sequence portion
  source 1..21: mol_type = other RNA
aatgtacacccaaagacaaaa

SEQ ID NO: 6727 - RNA, 21 nt, synthetic construct
  misc_feature 1..21: note = HBV-targeting guide sequence portion
  source 1..21: mol_type = other RNA
aatgtcaacgaccgaccttga

SEQ ID NO: 6728 - RNA, 21 nt, synthetic construct
  misc_feature 1..21: note = HBV-targeting guide sequence portion
  source 1..21: mol_type = other RNA
aatgtccatgccctaaagcca

SEQ ID NO: 6729 - RNA, 21 nt, synthetic construct
  misc_feature 1..21: note = HBV-targeting guide sequence portion
  source 1..21: mol_type = other RNA
aatgtgaaaccacaatagttg

SEQ ID NO: 6730 - RNA, 21 nt, synthetic construct
  misc_feature 1..21: note = HBV-targeting guide sequence portion
  source 1..21: mol_type = other RNA
aatgtgaacagtttgtaggcc

SEQ ID NO: 6731 - RNA, 21 nt, synthetic construct
  misc_feature 1..21: note = HBV-targeting guide sequence portion
  source 1..21: mol_type = other RNA
aatgtggttatcctgctttaa

SEQ ID NO: 6732 - RNA, 21 nt, synthetic construct
  misc_feature 1..21: note = HBV-targeting guide sequence portion
  source 1..21: mol_type = other RNA
aatgttagtatcccttggact

SEQ ID NO: 6733 - RNA, 21 nt, synthetic construct
  misc_feature 1..21: note = HBV-targeting guide sequence portion
  source 1..21: mol_type = other RNA
aatgtttcagaaaactcccgg

SEQ ID NO: 6734 - RNA, 21 nt, synthetic construct
  misc_feature 1..21: note = HBV-targeting guide sequence portion
  source 1..21: mol_type = other RNA
aatgtttgctccagaccggct

SEQ ID NO: 6735 - RNA, 21 nt, synthetic construct
  misc_feature 1..21: note = HBV-targeting guide sequence portion
  source 1..21: mol_type = other RNA
aattaagagaataaccccatc

SEQ ID NO: 6736 - RNA, 21 nt, synthetic construct
  misc_feature 1..21: note = HBV-targeting guide sequence portion
  source 1..21: mol_type = other RNA
aattagaggacagacgggaaa

SEQ ID NO: 6737 - RNA, 21 nt, synthetic construct
  misc_feature 1..21: note = HBV-targeting guide sequence portion
  source 1..21: mol_type = other RNA
aattagtacccacccaggtag

SEQ ID NO: 6738 - RNA, 21 nt, synthetic construct
  misc_feature 1..21: note = HBV-targeting guide sequence portion
  source 1..21: mol_type = other RNA
aattcaccaaatacttgccct

SEQ ID NO: 6739 - RNA, 21 nt, synthetic construct
  misc_feature 1..21: note = HBV-targeting guide sequence portion
  source 1..21: mol_type = other RNA
aattccaggatcatcaaccac

SEQ ID NO: 6740 - RNA, 21 nt, synthetic construct
  misc_feature 1..21: note = HBV-targeting guide sequence portion
  source 1..21: mol_type = other RNA
aattcctatgggagtgggcct

SEQ ID NO: 6741 - RNA, 21 nt, synthetic construct
  misc_feature 1..21: note = HBV-targeting guide sequence portion
  source 1..21: mol_type = other RNA
aattcgcagtccccaacctcc

SEQ ID NO: 6742 - RNA, 21 nt, synthetic construct
  misc_feature 1..21: note = HBV-targeting guide sequence portion
  source 1..21: mol_type = other RNA
aattcgttgacacactttcca

SEQ ID NO: 6743 - RNA, 21 nt, synthetic construct
  misc_feature 1..21: note = HBV-targeting guide sequence portion
  source 1..21: mol_type = other RNA
aattcttgcccaaggtcttac

SEQ ID NO: 6744 - RNA, 21 nt, synthetic construct
  misc_feature 1..21: note = HBV-targeting guide sequence portion
  source 1..21: mol_type = other RNA
aattctttatatgggtcaatg

SEQ ID NO: 6745 - RNA, 21 nt, synthetic construct
  misc_feature 1..21: note = HBV-targeting guide sequence portion
  source 1..21: mol_type = other RNA
aattctttgctggggagaact

SEQ ID NO: 6746 - RNA, 21 nt, synthetic construct
  misc_feature 1..21: note = HBV-targeting guide sequence portion
  source 1..21: mol_type = other RNA
aattgagagaagtccaccacg

SEQ ID NO: 6747 - RNA, 21 nt, synthetic construct
  misc_feature 1..21: note = HBV-targeting guide sequence portion
  source 1..21: mol_type = other RNA
aattgattatgcctgctaggt

SEQ ID NO: 6748 - RNA, 21 nt, synthetic construct
  misc_feature 1..21: note = HBV-targeting guide sequence portion
  source 1..21: mol_type = other RNA
aattgcttgcctgagtgcagt

SEQ ID NO: 6749 - RNA, 21 nt, synthetic construct
  misc_feature 1..21: note = HBV-targeting guide sequence portion
  source 1..21: mol_type = other RNA
aattggtaacagcggtataaa

SEQ ID NO: 6750 - RNA, 21 nt, synthetic construct
  misc_feature 1..21: note = HBV-targeting guide sequence portion
  source 1..21: mol_type = other RNA
aattggtctgcgcaccagcac

SEQ ID NO: 6751 - RNA, 21 nt, synthetic construct
  misc_feature 1..21: note = HBV-targeting guide sequence portion
  source 1..21: mol_type = other RNA
aattggtgggcgttcacggtg

SEQ ID NO: 6752 - RNA, 21 nt, synthetic construct
  misc_feature 1..21: note = HBV-targeting guide sequence portion
  source 1..21: mol_type = other RNA
aattgtgggtcttctgggttt

SEQ ID NO: 6753 - RNA, 21 nt, synthetic construct
  misc_feature 1..21: note = HBV-targeting guide sequence portion
  source 1..21: mol_type = other RNA
aatttagaagatcaagcatct

SEQ ID NO: 6754 - RNA, 21 nt, synthetic construct
  misc_feature 1..21: note = HBV-targeting guide sequence portion
  source 1..21: mol_type = other RNA
aatttaggataaaacctagca

SEQ ID NO: 6755 - RNA, 21 nt, synthetic construct
  misc_feature 1..21: note = HBV-targeting guide sequence portion
  source 1..21: mol_type = other RNA
aatttatgcctacagcctcct

SEQ ID NO: 6756 - RNA, 21 nt, synthetic construct
  misc_feature 1..21: note = HBV-targeting guide sequence portion
  source 1..21: mol_type = other RNA
aatttcaaccgtcttttctca

SEQ ID NO: 6757 - RNA, 21 nt, synthetic construct
  misc_feature 1..21: note = HBV-targeting guide sequence portion
  source 1..21: mol_type = other RNA
aatttcatgggctatgtcatt

SEQ ID NO: 6758 - RNA, 21 nt, synthetic construct
  misc_feature 1..21: note = HBV-targeting guide sequence portion
  source 1..21: mol_type = other RNA
aatttcccaccttatgagtcc

SEQ ID NO: 6759 - RNA, 21 nt, synthetic construct
  misc_feature 1..21: note = HBV-targeting guide sequence portion
  source 1..21: mol_type = other RNA
aatttggagctactgtggagt

SEQ ID NO: 6760 - RNA, 21 nt, synthetic construct
  misc_feature 1..21: note = HBV-targeting guide sequence portion
  source 1..21: mol_type = other RNA
aattttacggggctttattct

SEQ ID NO: 6761 - RNA, 21 nt, synthetic construct
  misc_feature 1..21: note = HBV-targeting guide sequence portion
  source 1..21: mol_type = other RNA
aattttccgaaagcccaggat

SEQ ID NO: 6762 - RNA, 21 nt, synthetic construct
  misc_feature 1..21: note = HBV-targeting guide sequence portion
  source 1..21: mol_type = other RNA
aattttctagggggaactacc

SEQ ID NO: 6763 - RNA, 21 nt, synthetic construct
  misc_feature 1..21: note = HBV-targeting guide sequence portion
  source 1..21: mol_type = other RNA
aattttcttttgtctttgggt

SEQ ID NO: 6764 - RNA, 21 nt, synthetic construct
  misc_feature 1..21: note = HBV-targeting guide sequence portion
  source 1..21: mol_type = other RNA
aattttggccaagacacacgg

SEQ ID NO: 6765 - RNA, 21 nt, synthetic construct
  misc_feature 1..21: note = HBV-targeting guide sequence portion
  source 1..21: mol_type = other RNA
acaaaacaaagagatggggtt

SEQ ID NO: 6766 - RNA, 21 nt, synthetic construct
  misc_feature 1..21: note = HBV-targeting guide sequence portion
  source 1..21: mol_type = other RNA
acaaaaccttcggatggaaac

SEQ ID NO: 6767 - RNA, 21 nt, synthetic construct
  misc_feature 1..21: note = HBV-targeting guide sequence portion
  source 1..21: mol_type = other RNA
acaaaagaaaattggtaacag

SEQ ID NO: 6768 - RNA, 21 nt, synthetic construct
  misc_feature 1..21: note = HBV-targeting guide sequence portion
  source 1..21: mol_type = other RNA
acaaaatcaaagaatgtttca

SEQ ID NO: 6769 - RNA, 21 nt, synthetic construct
  misc_feature 1..21: note = HBV-targeting guide sequence portion
  source 1..21: mol_type = other RNA
acaaaatcacatcatacacaa

SEQ ID NO: 6770 - RNA, 21 nt, synthetic construct
  misc_feature 1..21: note = HBV-targeting guide sequence portion
  source 1..21: mol_type = other RNA
acaaacagtctttgaagtatg

SEQ ID NO: 6771 - RNA, 21 nt, synthetic construct
  misc_feature 1..21: note = HBV-targeting guide sequence portion
  source 1..21: mol_type = other RNA
acaaactgttcacattttttg

SEQ ID NO: 6772 - RNA, 21 nt, synthetic construct
  misc_feature 1..21: note = HBV-targeting guide sequence portion
  source 1..21: mol_type = other RNA
acaaagagatggggttattct

SEQ ID NO: 6773 - RNA, 21 nt, synthetic construct
  misc_feature 1..21: note = HBV-targeting guide sequence portion
  source 1..21: mol_type = other RNA
acaaagatcattaatctaatc

SEQ ID NO: 6774 - RNA, 21 nt, synthetic construct
  misc_feature 1..21: note = HBV-targeting guide sequence portion
  source 1..21: mol_type = other RNA
acaaaggacgtcccgcgcagg

SEQ ID NO: 6775 - RNA, 21 nt, synthetic construct
  misc_feature 1..21: note = HBV-targeting guide sequence portion
  source 1..21: mol_type = other RNA
acaaatggcactagtaaactg

SEQ ID NO: 6776 - RNA, 21 nt, synthetic construct
  misc_feature 1..21: note = HBV-targeting guide sequence portion
  source 1..21: mol_type = other RNA
acaacacaagtctccggaagt

SEQ ID NO: 6777 - RNA, 21 nt, synthetic construct
  misc_feature 1..21: note = HBV-targeting guide sequence portion
  source 1..21: mol_type = other RNA
acaacagagttgtcagtcccg

SEQ ID NO: 6778 - RNA, 21 nt, synthetic construct
  misc_feature 1..21: note = HBV-targeting guide sequence portion
  source 1..21: mol_type = other RNA
acaaccttccaccaaactctg

SEQ ID NO: 6779 - RNA, 21 nt, synthetic construct
  misc_feature 1..21: note = HBV-targeting guide sequence portion
  source 1..21: mol_type = other RNA
acaactattgtggtttcacat

SEQ ID NO: 6780 - RNA, 21 nt, synthetic construct
  misc_feature 1..21: note = HBV-targeting guide sequence portion
  source 1..21: mol_type = other RNA
acaactctgttgtcctctccc

SEQ ID NO: 6781 - RNA, 21 nt, synthetic construct
  misc_feature 1..21: note = HBV-targeting guide sequence portion
  source 1..21: mol_type = other RNA
acaagaaatgtgaaaccacaa

SEQ ID NO: 6782 - RNA, 21 nt, synthetic construct
  misc_feature 1..21: note = HBV-targeting guide sequence portion
  source 1..21: mol_type = other RNA
acaagaagatgaggcatagca

SEQ ID NO: 6783 - RNA, 21 nt, synthetic construct
  misc_feature 1..21: note = HBV-targeting guide sequence portion
  source 1..21: mol_type = other RNA
acaagaatcctcacaataccg

SEQ ID NO: 6784 - RNA, 21 nt, synthetic construct
  misc_feature 1..21: note = HBV-targeting guide sequence portion
  source 1..21: mol_type = other RNA
acaagagatgattaggcagag

SEQ ID NO: 6785 - RNA, 21 nt, synthetic construct
  misc_feature 1..21: note = HBV-targeting guide sequence portion
  source 1..21: mol_type = other RNA
acaagagctacagcatggggc

SEQ ID NO: 6786 - RNA, 21 nt, synthetic construct
  misc_feature 1..21: note = HBV-targeting guide sequence portion
  source 1..21: mol_type = other RNA
acaagcggctaggagttccgc

SEQ ID NO: 6787 - RNA, 21 nt, synthetic construct
  misc_feature 1..21: note = HBV-targeting guide sequence portion
  source 1..21: mol_type = other RNA
acaaggaaaaccccgcctgta

SEQ ID NO: 6788 - RNA, 21 nt, synthetic construct
  misc_feature 1..21: note = HBV-targeting guide sequence portion
  source 1..21: mol_type = other RNA
acaaggatccctggccagacg

SEQ ID NO: 6789 - RNA, 21 nt, synthetic construct
  misc_feature 1..21: note = HBV-targeting guide sequence portion
  source 1..21: mol_type = other RNA
acaaggcctttctgtgtaaac

SEQ ID NO: 6790 - RNA, 21 nt, synthetic construct
  misc_feature 1..21: note = HBV-targeting guide sequence portion
  source 1..21: mol_type = other RNA
acaagggcattaaagcaggat

SEQ ID NO: 6791 - RNA, 21 nt, synthetic construct
  misc_feature 1..21: note = HBV-targeting guide sequence portion
  source 1..21: mol_type = other RNA
acaaggtaggagctggagcat

SEQ ID NO: 6792 - RNA, 21 nt, synthetic construct
  misc_feature 1..21: note = HBV-targeting guide sequence portion
  source 1..21: mol_type = other RNA
acaagtctccggaagtgttga

SEQ ID NO: 6793 - RNA, 21 nt, synthetic construct
  misc_feature 1..21: note = HBV-targeting guide sequence portion
  source 1..21: mol_type = other RNA
acaagttggaggacaggaggt

SEQ ID NO: 6794 - RNA, 21 nt, synthetic construct
  misc_feature 1..21: note = HBV-targeting guide sequence portion
  source 1..21: mol_type = other RNA
acaataccgcagagtctagac

SEQ ID NO: 6795 - RNA, 21 nt, synthetic construct
  misc_feature 1..21: note = HBV-targeting guide sequence portion
  source 1..21: mol_type = other RNA
acaatacctgaacctttaccc

SEQ ID NO: 6796 - RNA, 21 nt, synthetic construct
  misc_feature 1..21: note = HBV-targeting guide sequence portion
  source 1..21: mol_type = other RNA
acaatagttgtctgaacttta

SEQ ID NO: 6797 - RNA, 21 nt, synthetic construct
  misc_feature 1..21: note = HBV-targeting guide sequence portion
  source 1..21: mol_type = other RNA
acaatcaatgacatagcccat

SEQ ID NO: 6798 - RNA, 21 nt, synthetic construct
  misc_feature 1..21: note = HBV-targeting guide sequence portion
  source 1..21: mol_type = other RNA
acaatccagattgggacttca

SEQ ID NO: 6799 - RNA, 21 nt, synthetic construct
  misc_feature 1..21: note = HBV-targeting guide sequence portion
  source 1..21: mol_type = other RNA
acaatgctcaggagactccaa

SEQ ID NO: 6800 - RNA, 21 nt, synthetic construct
  misc_feature 1..21: note = HBV-targeting guide sequence portion
  source 1..21: mol_type = other RNA
acaatgtggttatcctgcttt

SEQ ID NO: 6801 - RNA, 21 nt, synthetic construct
  misc_feature 1..21: note = HBV-targeting guide sequence portion
  source 1..21: mol_type = other RNA
acaattcgttgacacactttc

SEQ ID NO: 6802 - RNA, 21 nt, synthetic construct
  misc_feature 1..21: note = HBV-targeting guide sequence portion
  source 1..21: mol_type = other RNA
acacaaaatcaaagaatgttt

SEQ ID NO: 6803 - RNA, 21 nt, synthetic construct
  misc_feature 1..21: note = HBV-targeting guide sequence portion
  source 1..21: mol_type = other RNA
acacaagtctccggaagtgtt

SEQ ID NO: 6804 - RNA, 21 nt, synthetic construct
  misc_feature 1..21: note = HBV-targeting guide sequence portion
  source 1..21: mol_type = other RNA
acacaatgtggttatcctgct

SEQ ID NO: 6805 - RNA, 21 nt, synthetic construct
  misc_feature 1..21: note = HBV-targeting guide sequence portion
  source 1..21: mol_type = other RNA
acacacggtagttccccctag

SEQ ID NO: 6806 - RNA, 21 nt, synthetic construct
  misc_feature 1..21: note = HBV-targeting guide sequence portion
  source 1..21: mol_type = other RNA
acacactctatggaaggcggg

SEQ ID NO: 6807 - RNA, 21 nt, synthetic construct
  misc_feature 1..21: note = HBV-targeting guide sequence portion
  source 1..21: mol_type = other RNA
acacactttccaatcaatagg

SEQ ID NO: 6808 - RNA, 21 nt, synthetic construct
  misc_feature 1..21: note = HBV-targeting guide sequence portion
  source 1..21: mol_type = other RNA
acacagaaaggccttgtaagt

SEQ ID NO: 6809 - RNA, 21 nt, synthetic construct
  misc_feature 1..21: note = HBV-targeting guide sequence portion
  source 1..21: mol_type = other RNA
acacatagcgcctcattctgt

SEQ ID NO: 6810 - RNA, 21 nt, synthetic construct
  misc_feature 1..21: note = HBV-targeting guide sequence portion
  source 1..21: mol_type = other RNA
acacatccagcgataaccagg

SEQ ID NO: 6811 - RNA, 21 nt, synthetic construct
  misc_feature 1..21: note = HBV-targeting guide sequence portion
  source 1..21: mol_type = other RNA
acaccaaatactctaggaccg

SEQ ID NO: 6812 - RNA, 21 nt, synthetic construct
  misc_feature 1..21: note = HBV-targeting guide sequence portion
  source 1..21: mol_type = other RNA
acaccaagatattatcaaaaa

SEQ ID NO: 6813 - RNA, 21 nt, synthetic construct
  misc_feature 1..21: note = HBV-targeting guide sequence portion
  source 1..21: mol_type = other RNA
acacccaaagacaaaagaaaa

SEQ ID NO: 6814 - RNA, 21 nt, synthetic construct
  misc_feature 1..21: note = HBV-targeting guide sequence portion
  source 1..21: mol_type = other RNA
acacccgccttccatagagtg

SEQ ID NO: 6815 - RNA, 21 nt, synthetic construct
  misc_feature 1..21: note = HBV-targeting guide sequence portion
  source 1..21: mol_type = other RNA
acaccctcttttcctaatata

SEQ ID NO: 6816 - RNA, 21 nt, synthetic construct
  misc_feature 1..21: note = HBV-targeting guide sequence portion
  source 1..21: mol_type = other RNA
acacgagcaggggtcctagga

SEQ ID NO: 6817 - RNA, 21 nt, synthetic construct
  misc_feature 1..21: note = HBV-targeting guide sequence portion
  source 1..21: mol_type = other RNA
acacggtagttccccctagaa

SEQ ID NO: 6818 - RNA, 21 nt, synthetic construct
  misc_feature 1..21: note = HBV-targeting guide sequence portion
  source 1..21: mol_type = other RNA
acacggtccggcagatgagaa

SEQ ID NO: 6819 - RNA, 21 nt, synthetic construct
  misc_feature 1..21: note = HBV-targeting guide sequence portion
  source 1..21: mol_type = other RNA
acactatttacacactctatg

SEQ ID NO: 6820 - RNA, 21 nt, synthetic construct
  misc_feature 1..21: note = HBV-targeting guide sequence portion
  source 1..21: mol_type = other RNA
acactcatatgggcctaaagt

SEQ ID NO: 6821 - RNA, 21 nt, synthetic construct
  misc_feature 1..21: note = HBV-targeting guide sequence portion
  source 1..21: mol_type = other RNA
acactccaaaagacaccaaat

SEQ ID NO: 6822 - RNA, 21 nt, synthetic construct
  misc_feature 1..21: note = HBV-targeting guide sequence portion
  source 1..21: mol_type = other RNA
acactctatggaaggcgggtg

SEQ ID NO: 6823 - RNA, 21 nt, synthetic construct
  misc_feature 1..21: note = HBV-targeting guide sequence portion
  source 1..21: mol_type = other RNA
acactctcttatataaaacac

SEQ ID NO: 6824 - RNA, 21 nt, synthetic construct
  misc_feature 1..21: note = HBV-targeting guide sequence portion
  source 1..21: mol_type = other RNA
acacttccggagacttgtgtt

SEQ ID NO: 6825 - RNA, 21 nt, synthetic construct
  misc_feature 1..21: note = HBV-targeting guide sequence portion
  source 1..21: mol_type = other RNA
acacttggcacagacctggcc

SEQ ID NO: 6826 - RNA, 21 nt, synthetic construct
  misc_feature 1..21: note = HBV-targeting guide sequence portion
  source 1..21: mol_type = other RNA
acactttccaatcaataggcc

SEQ ID NO: 6827 - RNA, 21 nt, synthetic construct
  misc_feature 1..21: note = HBV-targeting guide sequence portion
  source 1..21: mol_type = other RNA
acagaaaggccttgtaagttg

SEQ ID NO: 6828 - RNA, 21 nt, synthetic construct
  misc_feature 1..21: note = HBV-targeting guide sequence portion
  source 1..21: mol_type = other RNA
acagaatgaggcgctatgtgt

SEQ ID NO: 6829 - RNA, 21 nt, synthetic construct
  misc_feature 1..21: note = HBV-targeting guide sequence portion
  source 1..21: mol_type = other RNA
acagacctggccgttgcctgg

SEQ ID NO: 6830 - RNA, 21 nt, synthetic construct
  misc_feature 1..21: note = HBV-targeting guide sequence portion
  source 1..21: mol_type = other RNA
acagacgggaaacataccttg

SEQ ID NO: 6831 - RNA, 21 nt, synthetic construct
  misc_feature 1..21: note = HBV-targeting guide sequence portion
  source 1..21: mol_type = other RNA
acagacggggagtccgcgtaa

SEQ ID NO: 6832 - RNA, 21 nt, synthetic construct
  misc_feature 1..21: note = HBV-targeting guide sequence portion
  source 1..21: mol_type = other RNA
acagacttggcccccaatacc

SEQ ID NO: 6833 - RNA, 21 nt, synthetic construct
  misc_feature 1..21: note = HBV-targeting guide sequence portion
  source 1..21: mol_type = other RNA
acagagctgcggcggtatcta

SEQ ID NO: 6834 - RNA, 21 nt, synthetic construct
  misc_feature 1..21: note = HBV-targeting guide sequence portion
  source 1..21: mol_type = other RNA
acagagttgtcagtcccgaga

SEQ ID NO: 6835 - RNA, 21 nt, synthetic construct
  misc_feature 1..21: note = HBV-targeting guide sequence portion
  source 1..21: mol_type = other RNA
acagcaacaggagggatacat

SEQ ID NO: 6836 - RNA, 21 nt, synthetic construct
  misc_feature 1..21: note = HBV-targeting guide sequence portion
  source 1..21: mol_type = other RNA
acagcatcttgagtcccttta

SEQ ID NO: 6837 - RNA, 21 nt, synthetic construct
  misc_feature 1..21: note = HBV-targeting guide sequence portion
  source 1..21: mol_type = other RNA
acagcatggggcagaatcttt

SEQ ID NO: 6838 - RNA, 21 nt, synthetic construct
  misc_feature 1..21: note = HBV-targeting guide sequence portion
  source 1..21: mol_type = other RNA
acagcctagcagccatgggaa

SEQ ID NO: 6839 - RNA, 21 nt, synthetic construct
  misc_feature 1..21: note = HBV-targeting guide sequence portion
  source 1..21: mol_type = other RNA
acagcctcctagtacaaagat

SEQ ID NO: 6840 - RNA, 21 nt, synthetic construct
  misc_feature 1..21: note = HBV-targeting guide sequence portion
  source 1..21: mol_type = other RNA
acagcggggtaggctgccgtc

SEQ ID NO: 6841 - RNA, 21 nt, synthetic construct
  misc_feature 1..21: note = HBV-targeting guide sequence portion
  source 1..21: mol_type = other RNA
acagcggtataaagggactca

SEQ ID NO: 6842 - RNA, 21 nt, synthetic construct
  misc_feature 1..21: note = HBV-targeting guide sequence portion
  source 1..21: mol_type = other RNA
acagcttggaggcttgaacag

SEQ ID NO: 6843 - RNA, 21 nt, synthetic construct
  misc_feature 1..21: note = HBV-targeting guide sequence portion
  source 1..21: mol_type = other RNA
acaggagggatacatagaggt

SEQ ID NO: 6844 - RNA, 21 nt, synthetic construct
  misc_feature 1..21: note = HBV-targeting guide sequence portion
  source 1..21: mol_type = other RNA
acaggaggttggtgagtgatt

SEQ ID NO: 6845 - RNA, 21 nt, synthetic construct
  misc_feature 1..21: note = HBV-targeting guide sequence portion
  source 1..21: mol_type = other RNA
acaggcctattgattggaaag

SEQ ID NO: 6846 - RNA, 21 nt, synthetic construct
  misc_feature 1..21: note = HBV-targeting guide sequence portion
  source 1..21: mol_type = other RNA
acaggcctctcactctgggat

SEQ ID NO: 6847 - RNA, 21 nt, synthetic construct
  misc_feature 1..21: note = HBV-targeting guide sequence portion
  source 1..21: mol_type = other RNA
acaggcggggttttccttgtt

SEQ ID NO: 6848 - RNA, 21 nt, synthetic construct
  misc_feature 1..21: note = HBV-targeting guide sequence portion
  source 1..21: mol_type = other RNA
acagggccccaagcggcctcg

SEQ ID NO: 6849 - RNA, 21 nt, synthetic construct
  misc_feature 1..21: note = HBV-targeting guide sequence portion
  source 1..21: mol_type = other RNA
acagggtttactgttcctgaa

SEQ ID NO: 6850 - RNA, 21 nt, synthetic construct
  misc_feature 1..21: note = HBV-targeting guide sequence portion
  source 1..21: mol_type = other RNA
acaggtacagtagaagaataa

SEQ ID NO: 6851 - RNA, 21 nt, synthetic construct
  misc_feature 1..21: note = HBV-targeting guide sequence portion
  source 1..21: mol_type = other RNA
acaggtgcagtttccatccga

SEQ ID NO: 6852 - RNA, 21 nt, synthetic construct
  misc_feature 1..21: note = HBV-targeting guide sequence portion
  source 1..21: mol_type = other RNA
acagtaaaccctgttccgact

SEQ ID NO: 6853 - RNA, 21 nt, synthetic construct
  misc_feature 1..21: note = HBV-targeting guide sequence portion
  source 1..21: mol_type = other RNA
acagtagaagaataaagcccc

SEQ ID NO: 6854 - RNA, 21 nt, synthetic construct
  misc_feature 1..21: note = HBV-targeting guide sequence portion
  source 1..21: mol_type = other RNA
acagtagctccaaattcttta

SEQ ID NO: 6855 - RNA, 21 nt, synthetic construct
  misc_feature 1..21: note = HBV-targeting guide sequence portion
  source 1..21: mol_type = other RNA
acagtaggacatgaacaagag

SEQ ID NO: 6856 - RNA, 21 nt, synthetic construct
  misc_feature 1..21: note = HBV-targeting guide sequence portion
  source 1..21: mol_type = other RNA
acagtctttgaagtatgcctc

SEQ ID NO: 6857 - RNA, 21 nt, synthetic construct
  misc_feature 1..21: note = HBV-targeting guide sequence portion
  source 1..21: mol_type = other RNA
acagtgggggaaagccctacg

SEQ ID NO: 6858 - RNA, 21 nt, synthetic construct
  misc_feature 1..21: note = HBV-targeting guide sequence portion
  source 1..21: mol_type = other RNA
acagttaatgagaaaagacgg

SEQ ID NO: 6859 - RNA, 21 nt, synthetic construct
  misc_feature 1..21: note = HBV-targeting guide sequence portion
  source 1..21: mol_type = other RNA
acagtttgtaggcccgcttac

SEQ ID NO: 6860 - RNA, 21 nt, synthetic construct
  misc_feature 1..21: note = HBV-targeting guide sequence portion
  source 1..21: mol_type = other RNA
acataactgactactaggtcc

SEQ ID NO: 6861 - RNA, 21 nt, synthetic construct
  misc_feature 1..21: note = HBV-targeting guide sequence portion
  source 1..21: mol_type = other RNA
acataagaggactcttggact

SEQ ID NO: 6862 - RNA, 21 nt, synthetic construct
  misc_feature 1..21: note = HBV-targeting guide sequence portion
  source 1..21: mol_type = other RNA
acataccttgatagtccagaa

SEQ ID NO: 6863 - RNA, 21 nt, synthetic construct
  misc_feature 1..21: note = HBV-targeting guide sequence portion
  source 1..21: mol_type = other RNA
acatagaggttccttgagcag

SEQ ID NO: 6864 - RNA, 21 nt, synthetic construct
  misc_feature 1..21: note = HBV-targeting guide sequence portion
  source 1..21: mol_type = other RNA
acatagcccatgaaattaaga

SEQ ID NO: 6865 - RNA, 21 nt, synthetic construct
  misc_feature 1..21: note = HBV-targeting guide sequence portion
  source 1..21: mol_type = other RNA
acatagcgcctcattctgtgg

SEQ ID NO: 6866 - RNA, 21 nt, synthetic construct
  misc_feature 1..21: note = HBV-targeting guide sequence portion
  source 1..21: mol_type = other RNA
acatatcgtcaatcttctcga

SEQ ID NO: 6867 - RNA, 21 nt, synthetic construct
  misc_feature 1..21: note = HBV-targeting guide sequence portion
  source 1..21: mol_type = other RNA
acatcacatcaggattcctag

SEQ ID NO: 6868 - RNA, 21 nt, synthetic construct
  misc_feature 1..21: note = HBV-targeting guide sequence portion
  source 1..21: mol_type = other RNA
acatcaggattcctaggaccc

SEQ ID NO: 6869 - RNA, 21 nt, synthetic construct
  misc_feature 1..21: note = HBV-targeting guide sequence portion
  source 1..21: mol_type = other RNA
acatcatacacaaaatcaaag

SEQ ID NO: 6870 - RNA, 21 nt, synthetic construct
  misc_feature 1..21: note = HBV-targeting guide sequence portion
  source 1..21: mol_type = other RNA
acatcatccatataactgaaa

SEQ ID NO: 6871 - RNA, 21 nt, synthetic construct
  misc_feature 1..21: note = HBV-targeting guide sequence portion
  source 1..21: mol_type = other RNA
acatccagcgataaccaggac

SEQ ID NO: 6872 - RNA, 21 nt, synthetic construct
  misc_feature 1..21: note = HBV-targeting guide sequence portion
  source 1..21: mol_type = other RNA
acatcgttcccatggctgcta

SEQ ID NO: 6873 - RNA, 21 nt, synthetic construct
  misc_feature 1..21: note = HBV-targeting guide sequence portion
  source 1..21: mol_type = other RNA
acatctacaccaagatattat

SEQ ID NO: 6874 - RNA, 21 nt, synthetic construct
  misc_feature 1..21: note = HBV-targeting guide sequence portion
  source 1..21: mol_type = other RNA
acatctagttaatcattactt

SEQ ID NO: 6875 - RNA, 21 nt, synthetic construct
  misc_feature 1..21: note = HBV-targeting guide sequence portion
  source 1..21: mol_type = other RNA
acatgaacaagagatgattag

SEQ ID NO: 6876 - RNA, 21 nt, synthetic construct
  misc_feature 1..21: note = HBV-targeting guide sequence portion
  source 1..21: mol_type = other RNA
acatgcatacaagggcattaa

SEQ ID NO: 6877 - RNA, 21 nt, synthetic construct
  misc_feature 1..21: note = HBV-targeting guide sequence portion
  source 1..21: mol_type = other RNA
acatggagaacatcacatcag

SEQ ID NO: 6878 - RNA, 21 nt, synthetic construct
  misc_feature 1..21: note = HBV-targeting guide sequence portion
  source 1..21: mol_type = other RNA
acattctcgggactgacaact

SEQ ID NO: 6879 - RNA, 21 nt, synthetic construct
  misc_feature 1..21: note = HBV-targeting guide sequence portion
  source 1..21: mol_type = other RNA
acattctttgattttgtgtat

SEQ ID NO: 6880 - RNA, 21 nt, synthetic construct
  misc_feature 1..21: note = HBV-targeting guide sequence portion
  source 1..21: mol_type = other RNA
acattgacccatataaagaat

SEQ ID NO: 6881 - RNA, 21 nt, synthetic construct
  misc_feature 1..21: note = HBV-targeting guide sequence portion
  source 1..21: mol_type = other RNA
acattgagatccccgagattg

SEQ ID NO: 6882 - RNA, 21 nt, synthetic construct
  misc_feature 1..21: note = HBV-targeting guide sequence portion
  source 1..21: mol_type = other RNA
acattgcagagagtccaagag

SEQ ID NO: 6883 - RNA, 21 nt, synthetic construct
  misc_feature 1..21: note = HBV-targeting guide sequence portion
  source 1..21: mol_type = other RNA
acattgtgtaaaaggggcagc

SEQ ID NO: 6884 - RNA, 21 nt, synthetic construct
  misc_feature 1..21: note = HBV-targeting guide sequence portion
  source 1..21: mol_type = other RNA
acatttaaaccctaacaaaac

SEQ ID NO: 6885 - RNA, 21 nt, synthetic construct
  misc_feature 1..21: note = HBV-targeting guide sequence portion
  source 1..21: mol_type = other RNA
acatttcttgtcttacttttg

SEQ ID NO: 6886 - RNA, 21 nt, synthetic construct
  misc_feature 1..21: note = HBV-targeting guide sequence portion
  source 1..21: mol_type = other RNA
acattttttgataatatcttg

SEQ ID NO: 6887 - RNA, 21 nt, synthetic construct
  misc_feature 1..21: note = HBV-targeting guide sequence portion
  source 1..21: mol_type = other RNA
accaaactctgcaagatccca

SEQ ID NO: 6888 - RNA, 21 nt, synthetic construct
  misc_feature 1..21: note = HBV-targeting guide sequence portion
  source 1..21: mol_type = other RNA
accaaatactctaggaccgtt

SEQ ID NO: 6889 - RNA, 21 nt, synthetic construct
  misc_feature 1..21: note = HBV-targeting guide sequence portion
  source 1..21: mol_type = other RNA
accaaatacttgcccttggat

SEQ ID NO: 6890 - RNA, 21 nt, synthetic construct
  misc_feature 1..21: note = HBV-targeting guide sequence portion
  source 1..21: mol_type = other RNA
accaaatgcccctatcctatc

SEQ ID NO: 6891 - RNA, 21 nt, synthetic construct
  misc_feature 1..21: note = HBV-targeting guide sequence portion
  source 1..21: mol_type = other RNA
accaacaagaagatgaggcat

SEQ ID NO: 6892 - RNA, 21 nt, synthetic construct
  misc_feature 1..21: note = HBV-targeting guide sequence portion
  source 1..21: mol_type = other RNA
accaacctcctgtcctccaac

SEQ ID NO: 6893 - RNA, 21 nt, synthetic construct
  misc_feature 1..21: note = HBV-targeting guide sequence portion
  source 1..21: mol_type = other RNA
accaagatattatcaaaaaat

SEQ ID NO: 6894 - RNA, 21 nt, synthetic construct
  misc_feature 1..21: note = HBV-targeting guide sequence portion
  source 1..21: mol_type = other RNA
accaagccccaaccagtgggg

SEQ ID NO: 6895 - RNA, 21 nt, synthetic construct
  misc_feature 1..21: note = HBV-targeting guide sequence portion
  source 1..21: mol_type = other RNA
accaatcgccagtcaggacgg

SEQ ID NO: 6896 - RNA, 21 nt, synthetic construct
  misc_feature 1..21: note = HBV-targeting guide sequence portion
  source 1..21: mol_type = other RNA
accaattcttgcccaaggtct

SEQ ID NO: 6897 - RNA, 21 nt, synthetic construct
  misc_feature 1..21: note = HBV-targeting guide sequence portion
  source 1..21: mol_type = other RNA
accaatttatgcctacagcct

SEQ ID NO: 6898 - RNA, 21 nt, synthetic construct
  misc_feature 1..21: note = HBV-targeting guide sequence portion
  source 1..21: mol_type = other RNA
accaattttcttttgtctttg

SEQ ID NO: 6899 - RNA, 21 nt, synthetic construct
  misc_feature 1..21: note = HBV-targeting guide sequence portion
  source 1..21: mol_type = other RNA
accacaatagttgtctgaact

SEQ ID NO: 6900 - RNA, 21 nt, synthetic construct
  misc_feature 1..21: note = HBV-targeting guide sequence portion
  source 1..21: mol_type = other RNA
accacatcatccatataactg

SEQ ID NO: 6901 - RNA, 21 nt, synthetic construct
  misc_feature 1..21: note = HBV-targeting guide sequence portion
  source 1..21: mol_type = other RNA
accacattgtgtaaaaggggc

SEQ ID NO: 6902 - RNA, 21 nt, synthetic construct
  misc_feature 1..21: note = HBV-targeting guide sequence portion
  source 1..21: mol_type = other RNA
accaccaaatgcccctatcct

SEQ ID NO: 6903 - RNA, 21 nt, synthetic construct
  misc_feature 1..21: note = HBV-targeting guide sequence portion
  source 1..21: mol_type = other RNA
accaccagcacgggaccctgc

SEQ ID NO: 6904 - RNA, 21 nt, synthetic construct
  misc_feature 1..21: note = HBV-targeting guide sequence portion
  source 1..21: mol_type = other RNA
accaccagttggacccagcct

SEQ ID NO: 6905 - RNA, 21 nt, synthetic construct
  misc_feature 1..21: note = HBV-targeting guide sequence portion
  source 1..21: mol_type = other RNA
accaccgtgaacgcccaccaa

SEQ ID NO: 6906 - RNA, 21 nt, synthetic construct
  misc_feature 1..21: note = HBV-targeting guide sequence portion
  source 1..21: mol_type = other RNA
accacgagtctagactctgcg

SEQ ID NO: 6907 - RNA, 21 nt, synthetic construct
  misc_feature 1..21: note = HBV-targeting guide sequence portion
  source 1..21: mol_type = other RNA
accacggggcgcacctctctt

SEQ ID NO: 6908 - RNA, 21 nt, synthetic construct
  misc_feature 1..21: note = HBV-targeting guide sequence portion
  source 1..21: mol_type = other RNA
accactgaacaaatggcacta

SEQ ID NO: 6909 - RNA, 21 nt, synthetic construct
  misc_feature 1..21: note = HBV-targeting guide sequence portion
  source 1..21: mol_type = other RNA
accagcaatcctctgggattc

SEQ ID NO: 6910 - RNA, 21 nt, synthetic construct
  misc_feature 1..21: note = HBV-targeting guide sequence portion
  source 1..21: mol_type = other RNA
accagcaccatgcaacttttt

SEQ ID NO: 6911 - RNA, 21 nt, synthetic construct
  misc_feature 1..21: note = HBV-targeting guide sequence portion
  source 1..21: mol_type = other RNA
accagcacgggaccctgcaga

SEQ ID NO: 6912 - RNA, 21 nt, synthetic construct
  misc_feature 1..21: note = HBV-targeting guide sequence portion
  source 1..21: mol_type = other RNA
accagcagggagatacaggcc

SEQ ID NO: 6913 - RNA, 21 nt, synthetic construct
  misc_feature 1..21: note = HBV-targeting guide sequence portion
  source 1..21: mol_type = other RNA
accaggacaagttggaggaca

SEQ ID NO: 6914 - RNA, 21 nt, synthetic construct
  misc_feature 1..21: note = HBV-targeting guide sequence portion
  source 1..21: mol_type = other RNA
accagtgggggttgcatcagc

SEQ ID NO: 6915 - RNA, 21 nt, synthetic construct
  misc_feature 1..21: note = HBV-targeting guide sequence portion
  source 1..21: mol_type = other RNA
accagttggacccagccttca

SEQ ID NO: 6916 - RNA, 21 nt, synthetic construct
  misc_feature 1..21: note = HBV-targeting guide sequence portion
  source 1..21: mol_type = other RNA
accatactgcactcaggcaag

SEQ ID NO: 6917 - RNA, 21 nt, synthetic construct
  misc_feature 1..21: note = HBV-targeting guide sequence portion
  source 1..21: mol_type = other RNA
accatattcttgggaacaaga

SEQ ID NO: 6918 - RNA, 21 nt, synthetic construct
  misc_feature 1..21: note = HBV-targeting guide sequence portion
  source 1..21: mol_type = other RNA
accatgcaactttttcacctc

SEQ ID NO: 6919 - RNA, 21 nt, synthetic construct
  misc_feature 1..21: note = HBV-targeting guide sequence portion
  source 1..21: mol_type = other RNA
acccaaagacaaaagaaaatt

SEQ ID NO: 6920 - RNA, 21 nt, synthetic construct
  misc_feature 1..21: note = HBV-targeting guide sequence portion
  source 1..21: mol_type = other RNA
acccaaggcacagcttggagg

SEQ ID NO: 6921 - RNA, 21 nt, synthetic construct
  misc_feature 1..21: note = HBV-targeting guide sequence portion
  source 1..21: mol_type = other RNA
acccacaattcgttgacacac

SEQ ID NO: 6922 - RNA, 21 nt, synthetic construct
  misc_feature 1..21: note = HBV-targeting guide sequence portion
  source 1..21: mol_type = other RNA
acccacagaatgaggcgctat

SEQ ID NO: 6923 - RNA, 21 nt, synthetic construct
  misc_feature 1..21: note = HBV-targeting guide sequence portion
  source 1..21: mol_type = other RNA
acccacccaggtagctagagt

SEQ ID NO: 6924 - RNA, 21 nt, synthetic construct
  misc_feature 1..21: note = HBV-targeting guide sequence portion
  source 1..21: mol_type = other RNA
acccagaagacccacaattcg

SEQ ID NO: 6925 - RNA, 21 nt, synthetic construct
  misc_feature 1..21: note = HBV-targeting guide sequence portion
  source 1..21: mol_type = other RNA
acccagccttcagagcaaact

SEQ ID NO: 6926 - RNA, 21 nt, synthetic construct
  misc_feature 1..21: note = HBV-targeting guide sequence portion
  source 1..21: mol_type = other RNA
acccaggtagctagagtcatt

SEQ ID NO: 6927 - RNA, 21 nt, synthetic construct
  misc_feature 1..21: note = HBV-targeting guide sequence portion
  source 1..21: mol_type = other RNA
acccatataaagaatttggag

SEQ ID NO: 6928 - RNA, 21 nt, synthetic construct
  misc_feature 1..21: note = HBV-targeting guide sequence portion
  source 1..21: mol_type = other RNA
acccatctcgaggccgcttgg

SEQ ID NO: 6929 - RNA, 21 nt, synthetic construct
  misc_feature 1..21: note = HBV-targeting guide sequence portion
  source 1..21: mol_type = other RNA
accccaaaaggcctccgtgcg

SEQ ID NO: 6930 - RNA, 21 nt, synthetic construct
  misc_feature 1..21: note = HBV-targeting guide sequence portion
  source 1..21: mol_type = other RNA
accccaccgcacggaggcctt

SEQ ID NO: 6931 - RNA, 21 nt, synthetic construct
  misc_feature 1..21: note = HBV-targeting guide sequence portion
  source 1..21: mol_type = other RNA
accccatctctttgttttgtt

SEQ ID NO: 6932 - RNA, 21 nt, synthetic construct
  misc_feature 1..21: note = HBV-targeting guide sequence portion
  source 1..21: mol_type = other RNA
acccccactggttggggcttg

SEQ ID NO: 6933 - RNA, 21 nt, synthetic construct
  misc_feature 1..21: note = HBV-targeting guide sequence portion
  source 1..21: mol_type = other RNA
accccgcctgtaacacgagca

SEQ ID NO: 6934 - RNA, 21 nt, synthetic construct
  misc_feature 1..21: note = HBV-targeting guide sequence portion
  source 1..21: mol_type = other RNA
accccgctgtctccacctctg

SEQ ID NO: 6935 - RNA, 21 nt, synthetic construct
  misc_feature 1..21: note = HBV-targeting guide sequence portion
  source 1..21: mol_type = other RNA
accccgttgccaggcaacggc

SEQ ID NO: 6936 - RNA, 21 nt, synthetic construct
  misc_feature 1..21: note = HBV-targeting guide sequence portion
  source 1..21: mol_type = other RNA
acccctgctcgtgttacaggc

SEQ ID NO: 6937 - RNA, 21 nt, synthetic construct
  misc_feature 1..21: note = HBV-targeting guide sequence portion
  source 1..21: mol_type = other RNA
acccgccttccatagagtgtg

SEQ ID NO: 6938 - RNA, 21 nt, synthetic construct
  misc_feature 1..21: note = HBV-targeting guide sequence portion
  source 1..21: mol_type = other RNA
accctaacaaaacaaagagat

SEQ ID NO: 6939 - RNA, 21 nt, synthetic construct
  misc_feature 1..21: note = HBV-targeting guide sequence portion
  source 1..21: mol_type = other RNA
accctagcccgaatgctccag

SEQ ID NO: 6940 - RNA, 21 nt, synthetic construct
  misc_feature 1..21: note = HBV-targeting guide sequence portion
  source 1..21: mol_type = other RNA
accctcattggaaaacaccct

SEQ ID NO: 6941 - RNA, 21 nt, synthetic construct
  misc_feature 1..21: note = HBV-targeting guide sequence portion
  source 1..21: mol_type = other RNA
accctcttttcctaatataca

SEQ ID NO: 6942 - RNA, 21 nt, synthetic construct
  misc_feature 1..21: note = HBV-targeting guide sequence portion
  source 1..21: mol_type = other RNA
accctgcagaacctgcacgac

SEQ ID NO: 6943 - RNA, 21 nt, synthetic construct
  misc_feature 1..21: note = HBV-targeting guide sequence portion
  source 1..21: mol_type = other RNA
accctgcgctgaacatggaga

SEQ ID NO: 6944 - RNA, 21 nt, synthetic construct
  misc_feature 1..21: note = HBV-targeting guide sequence portion
  source 1..21: mol_type = other RNA
accctgttccgactactgcct

SEQ ID NO: 6945 - RNA, 21 nt, synthetic construct
  misc_feature 1..21: note = HBV-targeting guide sequence portion
  source 1..21: mol_type = other RNA
acccttatccaagggcaagta

SEQ ID NO: 6946 - RNA, 21 nt, synthetic construct
  misc_feature 1..21: note = HBV-targeting guide sequence portion
  source 1..21: mol_type = other RNA
accgaccacggggcgcacctc

SEQ ID NO: 6947 - RNA, 21 nt, synthetic construct
  misc_feature 1..21: note = HBV-targeting guide sequence portion
  source 1..21: mol_type = other RNA
accgaccttgaggcatacttc

SEQ ID NO: 6948 - RNA, 21 nt, synthetic construct
  misc_feature 1..21: note = HBV-targeting guide sequence portion
  source 1..21: mol_type = other RNA
accgcacggaggccttttggg

SEQ ID NO: 6949 - RNA, 21 nt, synthetic construct
  misc_feature 1..21: note = HBV-targeting guide sequence portion
  source 1..21: mol_type = other RNA
accgcagagtctagactcgtg

SEQ ID NO: 6950 - RNA, 21 nt, synthetic construct
  misc_feature 1..21: note = HBV-targeting guide sequence portion
  source 1..21: mol_type = other RNA
accgccgcagctctgtatcgg

SEQ ID NO: 6951 - RNA, 21 nt, synthetic construct
  misc_feature 1..21: note = HBV-targeting guide sequence portion
  source 1..21: mol_type = other RNA
accgctgttaccaattttctt

SEQ ID NO: 6952 - RNA, 21 nt, synthetic construct
  misc_feature 1..21: note = HBV-targeting guide sequence portion
  source 1..21: mol_type = other RNA
accggctgcgagcaaaacaag

SEQ ID NO: 6953 - RNA, 21 nt, synthetic construct
  misc_feature 1..21: note = HBV-targeting guide sequence portion
  source 1..21: mol_type = other RNA
accgggagttttctgaaacat

SEQ ID NO: 6954 - RNA, 21 nt, synthetic construct
  misc_feature 1..21: note = HBV-targeting guide sequence portion
  source 1..21: mol_type = other RNA
accgtcttttctcattaactg

SEQ ID NO: 6955 - RNA, 21 nt, synthetic construct
  misc_feature 1..21: note = HBV-targeting guide sequence portion
  source 1..21: mol_type = other RNA
accgtgaacgcccaccaattc

SEQ ID NO: 6956 - RNA, 21 nt, synthetic construct
  misc_feature 1..21: note = HBV-targeting guide sequence portion
  source 1..21: mol_type = other RNA
accgtgtgcacttcgcttcac

SEQ ID NO: 6957 - RNA, 21 nt, synthetic construct
  misc_feature 1..21: note = HBV-targeting guide sequence portion
  source 1..21: mol_type = other RNA
accgtgtgtcttggccaaaat

SEQ ID NO: 6958 - RNA, 21 nt, synthetic construct
  misc_feature 1..21: note = HBV-targeting guide sequence portion
  source 1..21: mol_type = other RNA
accgtttctcttccaaaagta

SEQ ID NO: 6959 - RNA, 21 nt, synthetic construct
  misc_feature 1..21: note = HBV-targeting guide sequence portion
  source 1..21: mol_type = other RNA
acctagcaggcataatcaatt

SEQ ID NO: 6960 - RNA, 21 nt, synthetic construct
  misc_feature 1..21: note = HBV-targeting guide sequence portion
  source 1..21: mol_type = other RNA
acctagtagtcagttatgtca

SEQ ID NO: 6961 - RNA, 21 nt, synthetic construct
  misc_feature 1..21: note = HBV-targeting guide sequence portion
  source 1..21: mol_type = other RNA
acctcaccatactgcactcag

SEQ ID NO: 6962 - RNA, 21 nt, synthetic construct
  misc_feature 1..21: note = HBV-targeting guide sequence portion
  source 1..21: mol_type = other RNA
acctccaatcactcaccaacc

SEQ ID NO: 6963 - RNA, 21 nt, synthetic construct
  misc_feature 1..21: note = HBV-targeting guide sequence portion
  source 1..21: mol_type = other RNA
acctcctgtcctccaacttgt

SEQ ID NO: 6964 - RNA, 21 nt, synthetic construct
  misc_feature 1..21: note = HBV-targeting guide sequence portion
  source 1..21: mol_type = other RNA
acctctatgtatccctcctgt

SEQ ID NO: 6965 - RNA, 21 nt, synthetic construct
  misc_feature 1..21: note = HBV-targeting guide sequence portion
  source 1..21: mol_type = other RNA
acctctctttacgcggactcc

SEQ ID NO: 6966 - RNA, 21 nt, synthetic construct
  misc_feature 1..21: note = HBV-targeting guide sequence portion
  source 1..21: mol_type = other RNA
acctctgagaaacactcatcc

SEQ ID NO: 6967 - RNA, 21 nt, synthetic construct
  misc_feature 1..21: note = HBV-targeting guide sequence portion
  source 1..21: mol_type = other RNA
acctctgcacgtcgcatggag

SEQ ID NO: 6968 - RNA, 21 nt, synthetic construct
  misc_feature 1..21: note = HBV-targeting guide sequence portion
  source 1..21: mol_type = other RNA
acctctgcctaatcatctctt

SEQ ID NO: 6969 - RNA, 21 nt, synthetic construct
  misc_feature 1..21: note = HBV-targeting guide sequence portion
  source 1..21: mol_type = other RNA
acctgaacctttaccccgttg

SEQ ID NO: 6970 - RNA, 21 nt, synthetic construct
  misc_feature 1..21: note = HBV-targeting guide sequence portion
  source 1..21: mol_type = other RNA
acctgcacgactcctgctcaa

SEQ ID NO: 6971 - RNA, 21 nt, synthetic construct
  misc_feature 1..21: note = HBV-targeting guide sequence portion
  source 1..21: mol_type = other RNA
acctgcctcgtcgtctaacaa

SEQ ID NO: 6972 - RNA, 21 nt, synthetic construct
  misc_feature 1..21: note = HBV-targeting guide sequence portion
  source 1..21: mol_type = other RNA
acctggccgttgcctggcaac

SEQ ID NO: 6973 - RNA, 21 nt, synthetic construct
  misc_feature 1..21: note = HBV-targeting guide sequence portion
  source 1..21: mol_type = other RNA
acctgggtgggtactaattta

SEQ ID NO: 6974 - RNA, 21 nt, synthetic construct
  misc_feature 1..21: note = HBV-targeting guide sequence portion
  source 1..21: mol_type = other RNA
acctgtattcccatcccatca

SEQ ID NO: 6975 - RNA, 21 nt, synthetic construct
  misc_feature 1..21: note = HBV-targeting guide sequence portion
  source 1..21: mol_type = other RNA
acctgtctttaaccctcattg

SEQ ID NO: 6976 - RNA, 21 nt, synthetic construct
  misc_feature 1..21: note = HBV-targeting guide sequence portion
  source 1..21: mol_type = other RNA
accttatgagtccaagggata

SEQ ID NO: 6977 - RNA, 21 nt, synthetic construct
  misc_feature 1..21: note = HBV-targeting guide sequence portion
  source 1..21: mol_type = other RNA
accttattatccagaacatct

SEQ ID NO: 6978 - RNA, 21 nt, synthetic construct
  misc_feature 1..21: note = HBV-targeting guide sequence portion
  source 1..21: mol_type = other RNA
accttccaccaaactctgcaa

SEQ ID NO: 6979 - RNA, 21 nt, synthetic construct
  misc_feature 1..21: note = HBV-targeting guide sequence portion
  source 1..21: mol_type = other RNA
accttcggatggaaactgcac

SEQ ID NO: 6980 - RNA, 21 nt, synthetic construct
  misc_feature 1..21: note = HBV-targeting guide sequence portion
  source 1..21: mol_type = other RNA
accttgaggcatacttcaaag

SEQ ID NO: 6981 - RNA, 21 nt, synthetic construct
  misc_feature 1..21: note = HBV-targeting guide sequence portion
  source 1..21: mol_type = other RNA
accttgatagtccagaagaac

SEQ ID NO: 6982 - RNA, 21 nt, synthetic construct
  misc_feature 1..21: note = HBV-targeting guide sequence portion
  source 1..21: mol_type = other RNA
accttgccagcaaatccgcct

SEQ ID NO: 6983 - RNA, 21 nt, synthetic construct
  misc_feature 1..21: note = HBV-targeting guide sequence portion
  source 1..21: mol_type = other RNA
accttgggcaagaattggtgg

SEQ ID NO: 6984 - RNA, 21 nt, synthetic construct
  misc_feature 1..21: note = HBV-targeting guide sequence portion
  source 1..21: mol_type = other RNA
accttgttggcgtctggccag

SEQ ID NO: 6985 - RNA, 21 nt, synthetic construct
  misc_feature 1..21: note = HBV-targeting guide sequence portion
  source 1..21: mol_type = other RNA
acctttaccccgttgccaggc

SEQ ID NO: 6986 - RNA, 21 nt, synthetic construct
  misc_feature 1..21: note = HBV-targeting guide sequence portion
  source 1..21: mol_type = other RNA
acctttccggctcctctgccg

SEQ ID NO: 6987 - RNA, 21 nt, synthetic construct
  misc_feature 1..21: note = HBV-targeting guide sequence portion
  source 1..21: mol_type = other RNA
acgaaccactgaacaaatggc

SEQ ID NO: 6988 - RNA, 21 nt, synthetic construct
  misc_feature 1..21: note = HBV-targeting guide sequence portion
  source 1..21: mol_type = other RNA
acgaagatctcaatcgccgcg

SEQ ID NO: 6989 - RNA, 21 nt, synthetic construct
  misc_feature 1..21: note = HBV-targeting guide sequence portion
  source 1..21: mol_type = other RNA
acgaattgtgggtcttctggg

SEQ ID NO: 6990 - RNA, 21 nt, synthetic construct
  misc_feature 1..21: note = HBV-targeting guide sequence portion
  source 1..21: mol_type = other RNA
acgacagggccccaagcggcc

SEQ ID NO: 6991 - RNA, 21 nt, synthetic construct
  misc_feature 1..21: note = HBV-targeting guide sequence portion
  source 1..21: mol_type = other RNA
acgacccatctcgaggccgct

SEQ ID NO: 6992 - RNA, 21 nt, synthetic construct
  misc_feature 1..21: note = HBV-targeting guide sequence portion
  source 1..21: mol_type = other RNA
acgaccgaccttgaggcatac

SEQ ID NO: 6993 - RNA, 21 nt, synthetic construct
  misc_feature 1..21: note = HBV-targeting guide sequence portion
  source 1..21: mol_type = other RNA
acgacgaggcaggtcccctag

SEQ ID NO: 6994 - RNA, 21 nt, synthetic construct
  misc_feature 1..21: note = HBV-targeting guide sequence portion
  source 1..21: mol_type = other RNA
acgactcctgctcaaggaacc

SEQ ID NO: 6995 - RNA, 21 nt, synthetic construct
  misc_feature 1..21: note = HBV-targeting guide sequence portion
  source 1..21: mol_type = other RNA
acgagagtaactccacagtag

SEQ ID NO: 6996 - RNA, 21 nt, synthetic construct
  misc_feature 1..21: note = HBV-targeting guide sequence portion
  source 1..21: mol_type = other RNA
acgagatcttctagataccgc

SEQ ID NO: 6997 - RNA, 21 nt, synthetic construct
  misc_feature 1..21: note = HBV-targeting guide sequence portion
  source 1..21: mol_type = other RNA
acgagcaggggtcctaggaat

SEQ ID NO: 6998 - RNA, 21 nt, synthetic construct
  misc_feature 1..21: note = HBV-targeting guide sequence portion
  source 1..21: mol_type = other RNA
acgaggcaggtcccctagaag

SEQ ID NO: 6999 - RNA, 21 nt, synthetic construct
  misc_feature 1..21: note = HBV-targeting guide sequence portion
  source 1..21: mol_type = other RNA
acgagtctagactctgcggta

SEQ ID NO: 7000 - RNA, 21 nt, synthetic construct
  misc_feature 1..21: note = HBV-targeting guide sequence portion
  source 1..21: mol_type = other RNA
acgatatgtgagaggcagtag

SEQ ID NO: 7001 - RNA, 21 nt, synthetic construct
  misc_feature 1..21: note = HBV-targeting guide sequence portion
  source 1..21: mol_type = other RNA
acgatgtatatttgcgggaga

SEQ ID NO: 7002 - RNA, 21 nt, synthetic construct
  misc_feature 1..21: note = HBV-targeting guide sequence portion
  source 1..21: mol_type = other RNA
acgcatgcgctgatggcctat

SEQ ID NO: 7003 - RNA, 21 nt, synthetic construct
  misc_feature 1..21: note = HBV-targeting guide sequence portion
  source 1..21: mol_type = other RNA
acgccaacaaggtaggagctg

SEQ ID NO: 7004 - RNA, 21 nt, synthetic construct
  misc_feature 1..21: note = HBV-targeting guide sequence portion
  source 1..21: mol_type = other RNA
acgcccaccaattcttgccca

SEQ ID NO: 7005 - RNA, 21 nt, synthetic construct
  misc_feature 1..21: note = HBV-targeting guide sequence portion
  source 1..21: mol_type = other RNA
acgccgcagacacatccagcg

SEQ ID NO: 7006 - RNA, 21 nt, synthetic construct
  misc_feature 1..21: note = HBV-targeting guide sequence portion
  source 1..21: mol_type = other RNA
acgcggactccccgtctgtgc

SEQ ID NO: 7007 - RNA, 21 nt, synthetic construct
  misc_feature 1..21: note = HBV-targeting guide sequence portion
  source 1..21: mol_type = other RNA
acgcggcgattgagatcttcg

SEQ ID NO: 7008 - RNA, 21 nt, synthetic construct
  misc_feature 1..21: note = HBV-targeting guide sequence portion
  source 1..21: mol_type = other RNA
acggaaggaaagaagtcagaa

SEQ ID NO: 7009 - RNA, 21 nt, synthetic construct
  misc_feature 1..21: note = HBV-targeting guide sequence portion
  source 1..21: mol_type = other RNA
acggaggccttttggggtgga

SEQ ID NO: 7010 - RNA, 21 nt, synthetic construct
  misc_feature 1..21: note = HBV-targeting guide sequence portion
  source 1..21: mol_type = other RNA
acggcagcctaccccgctgtc

SEQ ID NO: 7011 - RNA, 21 nt, synthetic construct
  misc_feature 1..21: note = HBV-targeting guide sequence portion
  source 1..21: mol_type = other RNA
acggcaggcagagaagaggac

SEQ ID NO: 7012 - RNA, 21 nt, synthetic construct
  misc_feature 1..21: note = HBV-targeting guide sequence portion
  source 1..21: mol_type = other RNA
acggccaggtctgtgccaagt

SEQ ID NO: 7013 - RNA, 21 nt, synthetic construct
  misc_feature 1..21: note = HBV-targeting guide sequence portion
  source 1..21: mol_type = other RNA
acgggaaacataccttgatag

SEQ ID NO: 7014 - RNA, 21 nt, synthetic construct
  misc_feature 1..21: note = HBV-targeting guide sequence portion
  source 1..21: mol_type = other RNA
acgggaccctgcagaacctgc

SEQ ID NO: 7015 - RNA, 21 nt, synthetic construct
  misc_feature 1..21: note = HBV-targeting guide sequence portion
  source 1..21: mol_type = other RNA
acgggacgtaaacaaaggacg

SEQ ID NO: 7016 - RNA, 21 nt, synthetic construct
  misc_feature 1..21: note = HBV-targeting guide sequence portion
  source 1..21: mol_type = other RNA
acgggctgaggcccactccca

SEQ ID NO: 7017 - RNA, 21 nt, synthetic construct
  misc_feature 1..21: note = HBV-targeting guide sequence portion
  source 1..21: mol_type = other RNA
acggggagtccgcgtaaagag

SEQ ID NO: 7018 - RNA, 21 nt, synthetic construct
  misc_feature 1..21: note = HBV-targeting guide sequence portion
  source 1..21: mol_type = other RNA
acggggcgcacctctctttac

SEQ ID NO: 7019 - RNA, 21 nt, synthetic construct
  misc_feature 1..21: note = HBV-targeting guide sequence portion
  source 1..21: mol_type = other RNA
acggggctttattcttctact

SEQ ID NO: 7020 - RNA, 21 nt, synthetic construct
  misc_feature 1..21: note = HBV-targeting guide sequence portion
  source 1..21: mol_type = other RNA
acggggtaaaggttcaggtat

SEQ ID NO: 7021 - RNA, 21 nt, synthetic construct
  misc_feature 1..21: note = HBV-targeting guide sequence portion
  source 1..21: mol_type = other RNA
acggtagttccccctagaaaa

SEQ ID NO: 7022 - RNA, 21 nt, synthetic construct
  misc_feature 1..21: note = HBV-targeting guide sequence portion
  source 1..21: mol_type = other RNA
acggtccggcagatgagaagg

SEQ ID NO: 7023 - RNA, 21 nt, synthetic construct
  misc_feature 1..21: note = HBV-targeting guide sequence portion
  source 1..21: mol_type = other RNA
acggtcctagagtatttggtg

SEQ ID NO: 7024 - RNA, 21 nt, synthetic construct
  misc_feature 1..21: note = HBV-targeting guide sequence portion
  source 1..21: mol_type = other RNA
acggtggtctccatgcgacgt

SEQ ID NO: 7025 - RNA, 21 nt, synthetic construct
  misc_feature 1..21: note = HBV-targeting guide sequence portion
  source 1..21: mol_type = other RNA
acggttgaaattgattatgcc

SEQ ID NO: 7026 - RNA, 21 nt, synthetic construct
  misc_feature 1..21: note = HBV-targeting guide sequence portion
  source 1..21: mol_type = other RNA
acgtaaacaaaggacgtcccg

SEQ ID NO: 7027 - RNA, 21 nt, synthetic construct
  misc_feature 1..21: note = HBV-targeting guide sequence portion
  source 1..21: mol_type = other RNA
acgtcccgcgcaggatccagt

SEQ ID NO: 7028 - RNA, 21 nt, synthetic construct
  misc_feature 1..21: note = HBV-targeting guide sequence portion
  source 1..21: mol_type = other RNA
acgtcccgtcggcgctgaatc

SEQ ID NO: 7029 - RNA, 21 nt, synthetic construct
  misc_feature 1..21: note = HBV-targeting guide sequence portion
  source 1..21: mol_type = other RNA
acgtcctttgtttacgtcccg

SEQ ID NO: 7030 - RNA, 21 nt, synthetic construct
  misc_feature 1..21: note = HBV-targeting guide sequence portion
  source 1..21: mol_type = other RNA
acgtcgcatggagaccaccgt

SEQ ID NO: 7031 - RNA, 21 nt, synthetic construct
  misc_feature 1..21: note = HBV-targeting guide sequence portion
  source 1..21: mol_type = other RNA
acgtgcagaggtgaagcgaag

SEQ ID NO: 7032 - RNA, 21 nt, synthetic construct
  misc_feature 1..21: note = HBV-targeting guide sequence portion
  source 1..21: mol_type = other RNA
actaacattgagatccccgag

SEQ ID NO: 7033 - RNA, 21 nt, synthetic construct
  misc_feature 1..21: note = HBV-targeting guide sequence portion
  source 1..21: mol_type = other RNA
actaatgactctagctacctg

SEQ ID NO: 7034 - RNA, 21 nt, synthetic construct
  misc_feature 1..21: note = HBV-targeting guide sequence portion
  source 1..21: mol_type = other RNA
actaatttagaagatcaagca

SEQ ID NO: 7035 - RNA, 21 nt, synthetic construct
  misc_feature 1..21: note = HBV-targeting guide sequence portion
  source 1..21: mol_type = other RNA
actaccgtgtgtcttggccaa

SEQ ID NO: 7036 - RNA, 21 nt, synthetic construct
  misc_feature 1..21: note = HBV-targeting guide sequence portion
  source 1..21: mol_type = other RNA
actactaggtccctagatgct

SEQ ID NO: 7037 - RNA, 21 nt, synthetic construct
  misc_feature 1..21: note = HBV-targeting guide sequence portion
  source 1..21: mol_type = other RNA
actactgcctctcacatatcg

SEQ ID NO: 7038 - RNA, 21 nt, synthetic construct
  misc_feature 1..21: note = HBV-targeting guide sequence portion
  source 1..21: mol_type = other RNA
actagacactatttacacact

SEQ ID NO: 7039 - RNA, 21 nt, synthetic construct
  misc_feature 1..21: note = HBV-targeting guide sequence portion
  source 1..21: mol_type = other RNA
actagatgttctggataataa

SEQ ID NO: 7040 - RNA, 21 nt, synthetic construct
  misc_feature 1..21: note = HBV-targeting guide sequence portion
  source 1..21: mol_type = other RNA
actaggaggctgtaggcataa

SEQ ID NO: 7041 - RNA, 21 nt, synthetic construct
  misc_feature 1..21: note = HBV-targeting guide sequence portion
  source 1..21: mol_type = other RNA
actaggtccctagatgcttga

SEQ ID NO: 7042 - RNA, 21 nt, synthetic construct
  misc_feature 1..21: note = HBV-targeting guide sequence portion
  source 1..21: mol_type = other RNA
actagtaaactgagccaagag

SEQ ID NO: 7043 - RNA, 21 nt, synthetic construct
  misc_feature 1..21: note = HBV-targeting guide sequence portion
  source 1..21: mol_type = other RNA
actagtgccatttgttcagtg

SEQ ID NO: 7044 - RNA, 21 nt, synthetic construct
  misc_feature 1..21: note = HBV-targeting guide sequence portion
  source 1..21: mol_type = other RNA
actatcaaggtatgtttcccg

SEQ ID NO: 7045 - RNA, 21 nt, synthetic construct
  misc_feature 1..21: note = HBV-targeting guide sequence portion
  source 1..21: mol_type = other RNA
actattgtggtttcacatttc

SEQ ID NO: 7046 - RNA, 21 nt, synthetic construct
  misc_feature 1..21: note = HBV-targeting guide sequence portion
  source 1..21: mol_type = other RNA
actatttacacactctatgga

SEQ ID NO: 7047 - RNA, 21 nt, synthetic construct
  misc_feature 1..21: note = HBV-targeting guide sequence portion
  source 1..21: mol_type = other RNA
actcaagatgctgtacagact

SEQ ID NO: 7048 - RNA, 21 nt, synthetic construct
  misc_feature 1..21: note = HBV-targeting guide sequence portion
  source 1..21: mol_type = other RNA
actcaccaacctcctgtcctc

SEQ ID NO: 7049 - RNA, 21 nt, synthetic construct
  misc_feature 1..21: note = HBV-targeting guide sequence portion
  source 1..21: mol_type = other RNA
actcaggcaagcaattctttg

SEQ ID NO: 7050 - RNA, 21 nt, synthetic construct
  misc_feature 1..21: note = HBV-targeting guide sequence portion
  source 1..21: mol_type = other RNA
actcataaggtgggaaatttt

SEQ ID NO: 7051 - RNA, 21 nt, synthetic construct
  misc_feature 1..21: note = HBV-targeting guide sequence portion
  source 1..21: mol_type = other RNA
actcatatgggcctaaagttc

SEQ ID NO: 7052 - RNA, 21 nt, synthetic construct
  misc_feature 1..21: note = HBV-targeting guide sequence portion
  source 1..21: mol_type = other RNA
actccaaaagacaccaaatac

SEQ ID NO: 7053 - RNA, 21 nt, synthetic construct
  misc_feature 1..21: note = HBV-targeting guide sequence portion
  source 1..21: mol_type = other RNA
actccaacaatccagattggg

SEQ ID NO: 7054 - RNA, 21 nt, synthetic construct
  misc_feature 1..21: note = HBV-targeting guide sequence portion
  source 1..21: mol_type = other RNA
actccaaggcatcccgataca

SEQ ID NO: 7055 - RNA, 21 nt, synthetic construct
  misc_feature 1..21: note = HBV-targeting guide sequence portion
  source 1..21: mol_type = other RNA
actccacaaccttccaccaaa

SEQ ID NO: 7056 - RNA, 21 nt, synthetic construct
  misc_feature 1..21: note = HBV-targeting guide sequence portion
  source 1..21: mol_type = other RNA
actccacagtagctccaaatt

SEQ ID NO: 7057 - RNA, 21 nt, synthetic construct
  misc_feature 1..21: note = HBV-targeting guide sequence portion
  source 1..21: mol_type = other RNA
actcccataggaattttccga

SEQ ID NO: 7058 - RNA, 21 nt, synthetic construct
  misc_feature 1..21: note = HBV-targeting guide sequence portion
  source 1..21: mol_type = other RNA
actccccgtctgtgccttctc

SEQ ID NO: 7059 - RNA, 21 nt, synthetic construct
  misc_feature 1..21: note = HBV-targeting guide sequence portion
  source 1..21: mol_type = other RNA
actcccggttaacaggcctat

SEQ ID NO: 7060 - RNA, 21 nt, synthetic construct
  misc_feature 1..21: note = HBV-targeting guide sequence portion
  source 1..21: mol_type = other RNA
actccctcgcctcgcagacga

SEQ ID NO: 7061 - RNA, 21 nt, synthetic construct
  misc_feature 1..21: note = HBV-targeting guide sequence portion
  source 1..21: mol_type = other RNA
actcctagccgcttgttttgc

SEQ ID NO: 7062 - RNA, 21 nt, synthetic construct
  misc_feature 1..21: note = HBV-targeting guide sequence portion
  source 1..21: mol_type = other RNA
actcctccagcttatagacca

SEQ ID NO: 7063 - RNA, 21 nt, synthetic construct
  misc_feature 1..21: note = HBV-targeting guide sequence portion
  source 1..21: mol_type = other RNA
actcctcccagtctttaaaca

SEQ ID NO: 7064 - RNA, 21 nt, synthetic construct
  misc_feature 1..21: note = HBV-targeting guide sequence portion
  source 1..21: mol_type = other RNA
actcctgctcaaggaacctct

SEQ ID NO: 7065 - RNA, 21 nt, synthetic construct
  misc_feature 1..21: note = HBV-targeting guide sequence portion
  source 1..21: mol_type = other RNA
actcgtggtggacttctctca

SEQ ID NO: 7066 - RNA, 21 nt, synthetic construct
  misc_feature 1..21: note = HBV-targeting guide sequence portion
  source 1..21: mol_type = other RNA
actctagctacctgggtgggt

SEQ ID NO: 7067 - RNA, 21 nt, synthetic construct
  misc_feature 1..21: note = HBV-targeting guide sequence portion
  source 1..21: mol_type = other RNA
actctaggaccgtttctcttc

SEQ ID NO: 7068 - RNA, 21 nt, synthetic construct
  misc_feature 1..21: note = HBV-targeting guide sequence portion
  source 1..21: mol_type = other RNA
actctatggaaggcgggtgtt

SEQ ID NO: 7069 - RNA, 21 nt, synthetic construct
  misc_feature 1..21: note = HBV-targeting guide sequence portion
  source 1..21: mol_type = other RNA
actctcgtttttgccttctga

SEQ ID NO: 7070 - RNA, 21 nt, synthetic construct
  misc_feature 1..21: note = HBV-targeting guide sequence portion
  source 1..21: mol_type = other RNA
actctctgcaatgtcaacgac

SEQ ID NO: 7071 - RNA, 21 nt, synthetic construct
  misc_feature 1..21: note = HBV-targeting guide sequence portion
  source 1..21: mol_type = other RNA
actctcttatataaaacaccc

SEQ ID NO: 7072 - RNA, 21 nt, synthetic construct
  misc_feature 1..21: note = HBV-targeting guide sequence portion
  source 1..21: mol_type = other RNA
actctgcaagatcccagagtg

SEQ ID NO: 7073 - RNA, 21 nt, synthetic construct
  misc_feature 1..21: note = HBV-targeting guide sequence portion
  source 1..21: mol_type = other RNA
actctgcggtattgtgaggat

SEQ ID NO: 7074 - RNA, 21 nt, synthetic construct
  misc_feature 1..21: note = HBV-targeting guide sequence portion
  source 1..21: mol_type = other RNA
actctgggatcttgcagagtt

SEQ ID NO: 7075 - RNA, 21 nt, synthetic construct
  misc_feature 1..21: note = HBV-targeting guide sequence portion
  source 1..21: mol_type = other RNA
actctgttgtcctctcccgca

SEQ ID NO: 7076 - RNA, 21 nt, synthetic construct
  misc_feature 1..21: note = HBV-targeting guide sequence portion
  source 1..21: mol_type = other RNA
actcttggactctctgcaatg

SEQ ID NO: 7077 - RNA, 21 nt, synthetic construct
  misc_feature 1..21: note = HBV-targeting guide sequence portion
  source 1..21: mol_type = other RNA
actgaaagccaaacagtgggg

SEQ ID NO: 7078 - RNA, 21 nt, synthetic construct
  misc_feature 1..21: note = HBV-targeting guide sequence portion
  source 1..21: mol_type = other RNA
actgaacaaatggcactagta

SEQ ID NO: 7079 - RNA, 21 nt, synthetic construct
  misc_feature 1..21: note = HBV-targeting guide sequence portion
  source 1..21: mol_type = other RNA
actgacaactctgttgtcctc

SEQ ID NO: 7080 - RNA, 21 nt, synthetic construct
  misc_feature 1..21: note = HBV-targeting guide sequence portion
  source 1..21: mol_type = other RNA
actgactactaggtccctaga

SEQ ID NO: 7081 - RNA, 21 nt, synthetic construct
  misc_feature 1..21: note = HBV-targeting guide sequence portion
  source 1..21: mol_type = other RNA
actgagccaagagaaacgggc

SEQ ID NO: 7082 - RNA, 21 nt, synthetic construct
  misc_feature 1..21: note = HBV-targeting guide sequence portion
  source 1..21: mol_type = other RNA
actgcacctgtattcccatcc

SEQ ID NO: 7083 - RNA, 21 nt, synthetic construct
  misc_feature 1..21: note = HBV-targeting guide sequence portion
  source 1..21: mol_type = other RNA
actgcactcaggcaagcaatt

SEQ ID NO: 7084 - RNA, 21 nt, synthetic construct
  misc_feature 1..21: note = HBV-targeting guide sequence portion
  source 1..21: mol_type = other RNA
actgcatggcctgaggatgag

SEQ ID NO: 7085 - RNA, 21 nt, synthetic construct
  misc_feature 1..21: note = HBV-targeting guide sequence portion
  source 1..21: mol_type = other RNA
actgcctctcacatatcgtca

SEQ ID NO: 7086 - RNA, 21 nt, synthetic construct
  misc_feature 1..21: note = HBV-targeting guide sequence portion
  source 1..21: mol_type = other RNA
actgcgaattttggccaagac

SEQ ID NO: 7087 - RNA, 21 nt, synthetic construct
  misc_feature 1..21: note = HBV-targeting guide sequence portion
  source 1..21: mol_type = other RNA
actgcggaactcctagccgct

SEQ ID NO: 7088 - RNA, 21 nt, synthetic construct
  misc_feature 1..21: note = HBV-targeting guide sequence portion
  source 1..21: mol_type = other RNA
actggagccaccagcagggag

SEQ ID NO: 7089 - RNA, 21 nt, synthetic construct
  misc_feature 1..21: note = HBV-targeting guide sequence portion
  source 1..21: mol_type = other RNA
actggatcctgcgcgggacgt

SEQ ID NO: 7090 - RNA, 21 nt, synthetic construct
  misc_feature 1..21: note = HBV-targeting guide sequence portion
  source 1..21: mol_type = other RNA
actggcgattggtagaggcag

SEQ ID NO: 7091 - RNA, 21 nt, synthetic construct
  misc_feature 1..21: note = HBV-targeting guide sequence portion
  source 1..21: mol_type = other RNA
actgggaggagttgggggagg

SEQ ID NO: 7092 - RNA, 21 nt, synthetic construct
  misc_feature 1..21: note = HBV-targeting guide sequence portion
  source 1..21: mol_type = other RNA
actggtggtcgggaaagaatc

SEQ ID NO: 7093 - RNA, 21 nt, synthetic construct
  misc_feature 1..21: note = HBV-targeting guide sequence portion
  source 1..21: mol_type = other RNA
actggttggggcttggtcata

SEQ ID NO: 7094 - RNA, 21 nt, synthetic construct
  misc_feature 1..21: note = HBV-targeting guide sequence portion
  source 1..21: mol_type = other RNA
actgtaagcgggcctacaaac

SEQ ID NO: 7095 - RNA, 21 nt, synthetic construct
  misc_feature 1..21: note = HBV-targeting guide sequence portion
  source 1..21: mol_type = other RNA
actgtacctgtctttaaccct

SEQ ID NO: 7096 - RNA, 21 nt, synthetic construct
  misc_feature 1..21: note = HBV-targeting guide sequence portion
  source 1..21: mol_type = other RNA
actgtggagttactctcgttt

SEQ ID NO: 7097 - RNA, 21 nt, synthetic construct
  misc_feature 1..21: note = HBV-targeting guide sequence portion
  source 1..21: mol_type = other RNA
actgttcaagcctccaagctg

SEQ ID NO: 7098 - RNA, 21 nt, synthetic construct
  misc_feature 1..21: note = HBV-targeting guide sequence portion
  source 1..21: mol_type = other RNA
actgttcacattttttgataa

SEQ ID NO: 7099 - RNA, 21 nt, synthetic construct
  misc_feature 1..21: note = HBV-targeting guide sequence portion
  source 1..21: mol_type = other RNA
actgttcctgaactggagcca

SEQ ID NO: 7100 - RNA, 21 nt, synthetic construct
  misc_feature 1..21: note = HBV-targeting guide sequence portion
  source 1..21: mol_type = other RNA
actgtttggctttcagttata

SEQ ID NO: 7101 - RNA, 21 nt, synthetic construct
  misc_feature 1..21: note = HBV-targeting guide sequence portion
  source 1..21: mol_type = other RNA
actgtttgtttaaagactggg

SEQ ID NO: 7102 - RNA, 21 nt, synthetic construct
  misc_feature 1..21: note = HBV-targeting guide sequence portion
  source 1..21: mol_type = other RNA
acttacaaggcctttctgtgt

SEQ ID NO: 7103 - RNA, 21 nt, synthetic construct
  misc_feature 1..21: note = HBV-targeting guide sequence portion
  source 1..21: mol_type = other RNA
acttcaaagactgtttgttta

SEQ ID NO: 7104 - RNA, 21 nt, synthetic construct
  misc_feature 1..21: note = HBV-targeting guide sequence portion
  source 1..21: mol_type = other RNA
acttcaatcccaacaaggatc

SEQ ID NO: 7105 - RNA, 21 nt, synthetic construct
  misc_feature 1..21: note = HBV-targeting guide sequence portion
  source 1..21: mol_type = other RNA
acttccaaactagacactatt

SEQ ID NO: 7106 - RNA, 21 nt, synthetic construct
  misc_feature 1..21: note = HBV-targeting guide sequence portion
  source 1..21: mol_type = other RNA
acttccggagacttgtgttgt

SEQ ID NO: 7107 - RNA, 21 nt, synthetic construct
  misc_feature 1..21: note = HBV-targeting guide sequence portion
  source 1..21: mol_type = other RNA
acttcgcttcacctctgcacg

SEQ ID NO: 7108 - RNA, 21 nt, synthetic construct
  misc_feature 1..21: note = HBV-targeting guide sequence portion
  source 1..21: mol_type = other RNA
acttctctcaattttctaggg

SEQ ID NO: 7109 - RNA, 21 nt, synthetic construct
  misc_feature 1..21: note = HBV-targeting guide sequence portion
  source 1..21: mol_type = other RNA
acttctttccttccgtacgag

SEQ ID NO: 7110 - RNA, 21 nt, synthetic construct
  misc_feature 1..21: note = HBV-targeting guide sequence portion
  source 1..21: mol_type = other RNA
acttgcccttggataagggta

SEQ ID NO: 7111 - RNA, 21 nt, synthetic construct
  misc_feature 1..21: note = HBV-targeting guide sequence portion
  source 1..21: mol_type = other RNA
acttggcacagacctggccgt

SEQ ID NO: 7112 - RNA, 21 nt, synthetic construct
  misc_feature 1..21: note = HBV-targeting guide sequence portion
  source 1..21: mol_type = other RNA
acttggcccccaataccacat

SEQ ID NO: 7113 - RNA, 21 nt, synthetic construct
  misc_feature 1..21: note = HBV-targeting guide sequence portion
  source 1..21: mol_type = other RNA
acttgtcctggttatcgctgg

SEQ ID NO: 7114 - RNA, 21 nt, synthetic construct
  misc_feature 1..21: note = HBV-targeting guide sequence portion
  source 1..21: mol_type = other RNA
acttgtgttgttagacgacga

SEQ ID NO: 7115 - RNA, 21 nt, synthetic construct
  misc_feature 1..21: note = HBV-targeting guide sequence portion
  source 1..21: mol_type = other RNA
actttaggcccatatgagtgt

SEQ ID NO: 7116 - RNA, 21 nt, synthetic construct
  misc_feature 1..21: note = HBV-targeting guide sequence portion
  source 1..21: mol_type = other RNA
actttccaatcaataggcctg

SEQ ID NO: 7117 - RNA, 21 nt, synthetic construct
  misc_feature 1..21: note = HBV-targeting guide sequence portion
  source 1..21: mol_type = other RNA
acttttggaagagaaacggtc

SEQ ID NO: 7118 - RNA, 21 nt, synthetic construct
  misc_feature 1..21: note = HBV-targeting guide sequence portion
  source 1..21: mol_type = other RNA
actttttcacctctgcctaat

SEQ ID NO: 7119 - RNA, 21 nt, synthetic construct
  misc_feature 1..21: note = HBV-targeting guide sequence portion
  source 1..21: mol_type = other RNA
actttttcgccaacttacaag

SEQ ID NO: 7120 - RNA, 21 nt, synthetic construct
  misc_feature 1..21: note = HBV-targeting guide sequence portion
  source 1..21: mol_type = other RNA
agaaaactcccggttaacagg

SEQ ID NO: 7121 - RNA, 21 nt, synthetic construct
  misc_feature 1..21: note = HBV-targeting guide sequence portion
  source 1..21: mol_type = other RNA
agaaaagacggttgaaattga

SEQ ID NO: 7122 - RNA, 21 nt, synthetic construct
  misc_feature 1..21: note = HBV-targeting guide sequence portion
  source 1..21: mol_type = other RNA
agaaaattgagagaagtccac

SEQ ID NO: 7123 - RNA, 21 nt, synthetic construct
  misc_feature 1..21: note = HBV-targeting guide sequence portion
  source 1..21: mol_type = other RNA
agaaaattggtaacagcggta

SEQ ID NO: 7124 - RNA, 21 nt, synthetic construct
  misc_feature 1..21: note = HBV-targeting guide sequence portion
  source 1..21: mol_type = other RNA
agaaacactcatcctcaggcc

SEQ ID NO: 7125 - RNA, 21 nt, synthetic construct
  misc_feature 1..21: note = HBV-targeting guide sequence portion
  source 1..21: mol_type = other RNA
agaaacgggctgaggcccact

SEQ ID NO: 7126 - RNA, 21 nt, synthetic construct
  misc_feature 1..21: note = HBV-targeting guide sequence portion
  source 1..21: mol_type = other RNA
agaaacggtcctagagtattt

SEQ ID NO: 7127 - RNA, 21 nt, synthetic construct
  misc_feature 1..21: note = HBV-targeting guide sequence portion
  source 1..21: mol_type = other RNA
agaaaggccttgtaagttggc

SEQ ID NO: 7128 - RNA, 21 nt, synthetic construct
  misc_feature 1..21: note = HBV-targeting guide sequence portion
  source 1..21: mol_type = other RNA
agaaatgtgaaaccacaatag

SEQ ID NO: 7129 - RNA, 21 nt, synthetic construct
  misc_feature 1..21: note = HBV-targeting guide sequence portion
  source 1..21: mol_type = other RNA
agaacatcacatcaggattcc

SEQ ID NO: 7130 - RNA, 21 nt, synthetic construct
  misc_feature 1..21: note = HBV-targeting guide sequence portion
  source 1..21: mol_type = other RNA
agaacatctagttaatcatta

SEQ ID NO: 7131 - RNA, 21 nt, synthetic construct
  misc_feature 1..21: note = HBV-targeting guide sequence portion
  source 1..21: mol_type = other RNA
agaaccaacaagaagatgagg

SEQ ID NO: 7132 - RNA, 21 nt, synthetic construct
  misc_feature 1..21: note = HBV-targeting guide sequence portion
  source 1..21: mol_type = other RNA
agaacctgcacgactcctgct

SEQ ID NO: 7133 - RNA, 21 nt, synthetic construct
  misc_feature 1..21: note = HBV-targeting guide sequence portion
  source 1..21: mol_type = other RNA
agaactaatgactctagctac

SEQ ID NO: 7134 - RNA, 21 nt, synthetic construct
  misc_feature 1..21: note = HBV-targeting guide sequence portion
  source 1..21: mol_type = other RNA
agaactccctcgcctcgcaga

SEQ ID NO: 7135 - RNA, 21 nt, synthetic construct
  misc_feature 1..21: note = HBV-targeting guide sequence portion
  source 1..21: mol_type = other RNA
agaagaaccaacaagaagatg

SEQ ID NO: 7136 - RNA, 21 nt, synthetic construct
  misc_feature 1..21: note = HBV-targeting guide sequence portion
  source 1..21: mol_type = other RNA
agaagaactccctcgcctcgc

SEQ ID NO: 7137 - RNA, 21 nt, synthetic construct
  misc_feature 1..21: note = HBV-targeting guide sequence portion
  source 1..21: mol_type = other RNA
agaagaagaactccctcgcct

SEQ ID NO: 7138 - RNA, 21 nt, synthetic construct
  misc_feature 1..21: note = HBV-targeting guide sequence portion
  source 1..21: mol_type = other RNA
agaagaataaagccccgtaaa

SEQ ID NO: 7139 - RNA, 21 nt, synthetic construct
  misc_feature 1..21: note = HBV-targeting guide sequence portion
  source 1..21: mol_type = other RNA
agaagacccacaattcgttga

SEQ ID NO: 7140 - RNA, 21 nt, synthetic construct
  misc_feature 1..21: note = HBV-targeting guide sequence portion
  source 1..21: mol_type = other RNA
agaagaggacgacagggcccc

SEQ ID NO: 7141 - RNA, 21 nt, synthetic construct
  misc_feature 1..21: note = HBV-targeting guide sequence portion
  source 1..21: mol_type = other RNA
agaagatcaagcatctaggga

SEQ ID NO: 7142 - RNA, 21 nt, synthetic construct
  misc_feature 1..21: note = HBV-targeting guide sequence portion
  source 1..21: mol_type = other RNA
agaagatctcaatctcgggga

SEQ ID NO: 7143 - RNA, 21 nt, synthetic construct
  misc_feature 1..21: note = HBV-targeting guide sequence portion
  source 1..21: mol_type = other RNA
agaagatctcgtacggaagga

SEQ ID NO: 7144 - RNA, 21 nt, synthetic construct
  misc_feature 1..21: note = HBV-targeting guide sequence portion
  source 1..21: mol_type = other RNA
agaagatgaggcatagcagca

SEQ ID NO: 7145 - RNA, 21 nt, synthetic construct
  misc_feature 1..21: note = HBV-targeting guide sequence portion
  source 1..21: mol_type = other RNA
agaagattgacgatatgtgag

SEQ ID NO: 7146 - RNA, 21 nt, synthetic construct
  misc_feature 1..21: note = HBV-targeting guide sequence portion
  source 1..21: mol_type = other RNA
agaaggcaaaaacgagagtaa

SEQ ID NO: 7147 - RNA, 21 nt, synthetic construct
  misc_feature 1..21: note = HBV-targeting guide sequence portion
  source 1..21: mol_type = other RNA
agaaggcacagacggggagtc

SEQ ID NO: 7148 - RNA, 21 nt, synthetic construct
  misc_feature 1..21: note = HBV-targeting guide sequence portion
  source 1..21: mol_type = other RNA
agaagtcagaaggcaaaaacg

SEQ ID NO: 7149 - RNA, 21 nt, synthetic construct
  misc_feature 1..21: note = HBV-targeting guide sequence portion
  source 1..21: mol_type = other RNA
agaagtccaccacgagtctag

SEQ ID NO: 7150 - RNA, 21 nt, synthetic construct
  misc_feature 1..21: note = HBV-targeting guide sequence portion
  source 1..21: mol_type = other RNA
agaataaagccccgtaaaatt

SEQ ID NO: 7151 - RNA, 21 nt, synthetic construct
  misc_feature 1..21: note = HBV-targeting guide sequence portion
  source 1..21: mol_type = other RNA
agaataaccccatctctttgt

SEQ ID NO: 7152 - RNA, 21 nt, synthetic construct
  misc_feature 1..21: note = HBV-targeting guide sequence portion
  source 1..21: mol_type = other RNA
agaatatggtgacccacagaa

SEQ ID NO: 7153 - RNA, 21 nt, synthetic construct
  misc_feature 1..21: note = HBV-targeting guide sequence portion
  source 1..21: mol_type = other RNA
agaatcccagaggattgctgg

SEQ ID NO: 7154 - RNA, 21 nt, synthetic construct
  misc_feature 1..21: note = HBV-targeting guide sequence portion
  source 1..21: mol_type = other RNA
agaatcctcacaataccgcag

SEQ ID NO: 7155 - RNA, 21 nt, synthetic construct
  misc_feature 1..21: note = HBV-targeting guide sequence portion
  source 1..21: mol_type = other RNA
agaatctttccaccagcaatc

SEQ ID NO: 7156 - RNA, 21 nt, synthetic construct
  misc_feature 1..21: note = HBV-targeting guide sequence portion
  source 1..21: mol_type = other RNA
agaatgaggcgctatgtgttg

SEQ ID NO: 7157 - RNA, 21 nt, synthetic construct
  misc_feature 1..21: note = HBV-targeting guide sequence portion
  source 1..21: mol_type = other RNA
agaatgtttcagaaaactccc

SEQ ID NO: 7158 - RNA, 21 nt, synthetic construct
  misc_feature 1..21: note = HBV-targeting guide sequence portion
  source 1..21: mol_type = other RNA
agaatgtttgctccagaccgg

SEQ ID NO: 7159 - RNA, 21 nt, synthetic construct
  misc_feature 1..21: note = HBV-targeting guide sequence portion
  source 1..21: mol_type = other RNA
agaattgcttgcctgagtgca

SEQ ID NO: 7160 - RNA, 21 nt, synthetic construct
  misc_feature 1..21: note = HBV-targeting guide sequence portion
  source 1..21: mol_type = other RNA
agaattggtgggcgttcacgg

SEQ ID NO: 7161 - RNA, 21 nt, synthetic construct
  misc_feature 1..21: note = HBV-targeting guide sequence portion
  source 1..21: mol_type = other RNA
agaatttggagctactgtgga

SEQ ID NO: 7162 - RNA, 21 nt, synthetic construct
  misc_feature 1..21: note = HBV-targeting guide sequence portion
  source 1..21: mol_type = other RNA
agacaaaagaaaattggtaac

SEQ ID NO: 7163 - RNA, 21 nt, synthetic construct
  misc_feature 1..21: note = HBV-targeting guide sequence portion
  source 1..21: mol_type = other RNA
agacaactattgtggtttcac

SEQ ID NO: 7164 - RNA, 21 nt, synthetic construct
  misc_feature 1..21: note = HBV-targeting guide sequence portion
  source 1..21: mol_type = other RNA
agacaagaaatgtgaaaccac

SEQ ID NO: 7165 - RNA, 21 nt, synthetic construct
  misc_feature 1..21: note = HBV-targeting guide sequence portion
  source 1..21: mol_type = other RNA
agacacacggtagttccccct

SEQ ID NO: 7166 - RNA, 21 nt, synthetic construct
  misc_feature 1..21: note = HBV-targeting guide sequence portion
  source 1..21: mol_type = other RNA
agacacatccagcgataacca

SEQ ID NO: 7167 - RNA, 21 nt, synthetic construct
  misc_feature 1..21: note = HBV-targeting guide sequence portion
  source 1..21: mol_type = other RNA
agacaccaaatactctaggac

SEQ ID NO: 7168 - RNA, 21 nt, synthetic construct
  misc_feature 1..21: note = HBV-targeting guide sequence portion
  source 1..21: mol_type = other RNA
agacactatttacacactcta

SEQ ID NO: 7169 - RNA, 21 nt, synthetic construct
  misc_feature 1..21: note = HBV-targeting guide sequence portion
  source 1..21: mol_type = other RNA
agacagcggggtaggctgccg

SEQ ID NO: 7170 - RNA, 21 nt, synthetic construct
  misc_feature 1..21: note = HBV-targeting guide sequence portion
  source 1..21: mol_type = other RNA
agacaggtacagtagaagaat

SEQ ID NO: 7171 - RNA, 21 nt, synthetic construct
  misc_feature 1..21: note = HBV-targeting guide sequence portion
  source 1..21: mol_type = other RNA
agaccaatttatgcctacagc

SEQ ID NO: 7172 - RNA, 21 nt, synthetic construct
  misc_feature 1..21: note = HBV-targeting guide sequence portion
  source 1..21: mol_type = other RNA
agaccaccaaatgcccctatc

SEQ ID NO: 7173 - RNA, 21 nt, synthetic construct
  misc_feature 1..21: note = HBV-targeting guide sequence portion
  source 1..21: mol_type = other RNA
agaccaccgtgaacgcccacc

SEQ ID NO: 7174 - RNA, 21 nt, synthetic construct
  misc_feature 1..21: note = HBV-targeting guide sequence portion
  source 1..21: mol_type = other RNA
agacccacaattcgttgacac

SEQ ID NO: 7175 - RNA, 21 nt, synthetic construct
  misc_feature 1..21: note = HBV-targeting guide sequence portion
  source 1..21: mol_type = other RNA
agaccggctgcgagcaaaaca

SEQ ID NO: 7176 - RNA, 21 nt, synthetic construct
  misc_feature 1..21: note = HBV-targeting guide sequence portion
  source 1..21: mol_type = other RNA
agacctggccgttgcctggca

SEQ ID NO: 7177 - RNA, 21 nt, synthetic construct
  misc_feature 1..21: note = HBV-targeting guide sequence portion
  source 1..21: mol_type = other RNA
agaccttgggcaagaattggt

SEQ ID NO: 7178 - RNA, 21 nt, synthetic construct
  misc_feature 1..21: note = HBV-targeting guide sequence portion
  source 1..21: mol_type = other RNA
agacgaagatctcaatcgccg

SEQ ID NO: 7179 - RNA, 21 nt, synthetic construct
  misc_feature 1..21: note = HBV-targeting guide sequence portion
  source 1..21: mol_type = other RNA
agacgacgaggcaggtcccct

SEQ ID NO: 7180 - RNA, 21 nt, synthetic construct
  misc_feature 1..21: note = HBV-targeting guide sequence portion
  source 1..21: mol_type = other RNA
agacgccaacaaggtaggagc

SEQ ID NO: 7181 - RNA, 21 nt, synthetic construct
  misc_feature 1..21: note = HBV-targeting guide sequence portion
  source 1..21: mol_type = other RNA
agacgggaaacataccttgat

SEQ ID NO: 7182 - RNA, 21 nt, synthetic construct
  misc_feature 1..21: note = HBV-targeting guide sequence portion
  source 1..21: mol_type = other RNA
agacggggagtccgcgtaaag

SEQ ID NO: 7183 - RNA, 21 nt, synthetic construct
  misc_feature 1..21: note = HBV-targeting guide sequence portion
  source 1..21: mol_type = other RNA
agacggttgaaattgattatg

SEQ ID NO: 7184 - RNA, 21 nt, synthetic construct
  misc_feature 1..21: note = HBV-targeting guide sequence portion
  source 1..21: mol_type = other RNA
agactccaaggcatcccgata

SEQ ID NO: 7185 - RNA, 21 nt, synthetic construct
  misc_feature 1..21: note = HBV-targeting guide sequence portion
  source 1..21: mol_type = other RNA
agactcgtggtggacttctct

SEQ ID NO: 7186 - RNA, 21 nt, synthetic construct
  misc_feature 1..21: note = HBV-targeting guide sequence portion
  source 1..21: mol_type = other RNA
agactctgcggtattgtgagg

SEQ ID NO: 7187 - RNA, 21 nt, synthetic construct
  misc_feature 1..21: note = HBV-targeting guide sequence portion
  source 1..21: mol_type = other RNA
agactgggaggagttggggga

SEQ ID NO: 7188 - RNA, 21 nt, synthetic construct
  misc_feature 1..21: note = HBV-targeting guide sequence portion
  source 1..21: mol_type = other RNA
agactgtttgtttaaagactg

SEQ ID NO: 7189 - RNA, 21 nt, synthetic construct
  misc_feature 1..21: note = HBV-targeting guide sequence portion
  source 1..21: mol_type = other RNA
agacttggcccccaataccac

SEQ ID NO: 7190 - RNA, 21 nt, synthetic construct
  misc_feature 1..21: note = HBV-targeting guide sequence portion
  source 1..21: mol_type = other RNA
agacttgtgttgttagacgac

SEQ ID NO: 7191 - RNA, 21 nt, synthetic construct
  misc_feature 1..21: note = HBV-targeting guide sequence portion
  source 1..21: mol_type = other RNA
agagaaacgggctgaggccca

SEQ ID NO: 7192 - RNA, 21 nt, synthetic construct
  misc_feature 1..21: note = HBV-targeting guide sequence portion
  source 1..21: mol_type = other RNA
agagaaacggtcctagagtat

SEQ ID NO: 7193 - RNA, 21 nt, synthetic construct
  misc_feature 1..21: note = HBV-targeting guide sequence portion
  source 1..21: mol_type = other RNA
agagaagaggacgacagggcc

SEQ ID NO: 7194 - RNA, 21 nt, synthetic construct
  misc_feature 1..21: note = HBV-targeting guide sequence portion
  source 1..21: mol_type = other RNA
agagaagtccaccacgagtct

SEQ ID NO: 7195 - RNA, 21 nt, synthetic construct
  misc_feature 1..21: note = HBV-targeting guide sequence portion
  source 1..21: mol_type = other RNA
agagaataaccccatctcttt

SEQ ID NO: 7196 - RNA, 21 nt, synthetic construct
  misc_feature 1..21: note = HBV-targeting guide sequence portion
  source 1..21: mol_type = other RNA
agagaggtgcgccccgtggtc

SEQ ID NO: 7197 - RNA, 21 nt, synthetic construct
  misc_feature 1..21: note = HBV-targeting guide sequence portion
  source 1..21: mol_type = other RNA
agagagtccaagagtcctctt

SEQ ID NO: 7198 - RNA, 21 nt, synthetic construct
  misc_feature 1..21: note = HBV-targeting guide sequence portion
  source 1..21: mol_type = other RNA
agagagtgtcaacacatagcg

SEQ ID NO: 7199 - RNA, 21 nt, synthetic construct
  misc_feature 1..21: note = HBV-targeting guide sequence portion
  source 1..21: mol_type = other RNA
agagatgattaggcagaggtg

SEQ ID NO: 7200 - RNA, 21 nt, synthetic construct
  misc_feature 1..21: note = HBV-targeting guide sequence portion
  source 1..21: mol_type = other RNA
agagatggggttattctctta

SEQ ID NO: 7201 - RNA, 21 nt, synthetic construct
  misc_feature 1..21: note = HBV-targeting guide sequence portion
  source 1..21: mol_type = other RNA
agagcaaactccaacaatcca

SEQ ID NO: 7202 - RNA, 21 nt, synthetic construct
  misc_feature 1..21: note = HBV-targeting guide sequence portion
  source 1..21: mol_type = other RNA
agagctacagcatggggcaga

SEQ ID NO: 7203 - RNA, 21 nt, synthetic construct
  misc_feature 1..21: note = HBV-targeting guide sequence portion
  source 1..21: mol_type = other RNA
agagctgcggcggtatctaga

SEQ ID NO: 7204 - RNA, 21 nt, synthetic construct
  misc_feature 1..21: note = HBV-targeting guide sequence portion
  source 1..21: mol_type = other RNA
agaggaagatgataaaacgcc

SEQ ID NO: 7205 - RNA, 21 nt, synthetic construct
  misc_feature 1..21: note = HBV-targeting guide sequence portion
  source 1..21: mol_type = other RNA
agaggacaacagagttgtcag

SEQ ID NO: 7206 - RNA, 21 nt, synthetic construct
  misc_feature 1..21: note = HBV-targeting guide sequence portion
  source 1..21: mol_type = other RNA
agaggacagacgggaaacata

SEQ ID NO: 7207 - RNA, 21 nt, synthetic construct
  misc_feature 1..21: note = HBV-targeting guide sequence portion
  source 1..21: mol_type = other RNA
agaggacgacagggccccaag

SEQ ID NO: 7208 - RNA, 21 nt, synthetic construct
  misc_feature 1..21: note = HBV-targeting guide sequence portion
  source 1..21: mol_type = other RNA
agaggactcttggactctctg

SEQ ID NO: 7209 - RNA, 21 nt, synthetic construct
  misc_feature 1..21: note = HBV-targeting guide sequence portion
  source 1..21: mol_type = other RNA
agaggagccggaaaggttcca

SEQ ID NO: 7210 - RNA, 21 nt, synthetic construct
  misc_feature 1..21: note = HBV-targeting guide sequence portion
  source 1..21: mol_type = other RNA
agaggattgctggtggaaaga

SEQ ID NO: 7211 - RNA, 21 nt, synthetic construct
  misc_feature 1..21: note = HBV-targeting guide sequence portion
  source 1..21: mol_type = other RNA
agaggcaggaggcggatttgc

SEQ ID NO: 7212 - RNA, 21 nt, synthetic construct
  misc_feature 1..21: note = HBV-targeting guide sequence portion
  source 1..21: mol_type = other RNA
agaggcagtagtcggaacagg

SEQ ID NO: 7213 - RNA, 21 nt, synthetic construct
  misc_feature 1..21: note = HBV-targeting guide sequence portion
  source 1..21: mol_type = other RNA
agaggcctgtatctccctgct

SEQ ID NO: 7214 - RNA, 21 nt, synthetic construct
  misc_feature 1..21: note = HBV-targeting guide sequence portion
  source 1..21: mol_type = other RNA
agagggtgttttccaatgagg

SEQ ID NO: 7215 - RNA, 21 nt, synthetic construct
  misc_feature 1..21: note = HBV-targeting guide sequence portion
  source 1..21: mol_type = other RNA
agaggtgaaaaagttgcatgg

SEQ ID NO: 7216 - RNA, 21 nt, synthetic construct
  misc_feature 1..21: note = HBV-targeting guide sequence portion
  source 1..21: mol_type = other RNA
agaggtgaagcgaagtgcaca

SEQ ID NO: 7217 - RNA, 21 nt, synthetic construct
  misc_feature 1..21: note = HBV-targeting guide sequence portion
  source 1..21: mol_type = other RNA
agaggtgcgccccgtggtcgg

SEQ ID NO: 7218 - RNA, 21 nt, synthetic construct
  misc_feature 1..21: note = HBV-targeting guide sequence portion
  source 1..21: mol_type = other RNA
agaggtggagacagcggggta

SEQ ID NO: 7219 - RNA, 21 nt, synthetic construct
  misc_feature 1..21: note = HBV-targeting guide sequence portion
  source 1..21: mol_type = other RNA
agaggttccttgagcaggagt

SEQ ID NO: 7220 - RNA, 21 nt, synthetic construct
  misc_feature 1..21: note = HBV-targeting guide sequence portion
  source 1..21: mol_type = other RNA
agagtaactccacagtagctc

SEQ ID NO: 7221 - RNA, 21 nt, synthetic construct
  misc_feature 1..21: note = HBV-targeting guide sequence portion
  source 1..21: mol_type = other RNA
agagtatttggtgtcttttgg

SEQ ID NO: 7222 - RNA, 21 nt, synthetic construct
  misc_feature 1..21: note = HBV-targeting guide sequence portion
  source 1..21: mol_type = other RNA
agagtcattagttctccccag

SEQ ID NO: 7223 - RNA, 21 nt, synthetic construct
  misc_feature 1..21: note = HBV-targeting guide sequence portion
  source 1..21: mol_type = other RNA
agagtccaagagtcctcttat

SEQ ID NO: 7224 - RNA, 21 nt, synthetic construct
  misc_feature 1..21: note = HBV-targeting guide sequence portion
  source 1..21: mol_type = other RNA
agagtcctcttatgtaagacc

SEQ ID NO: 7225 - RNA, 21 nt, synthetic construct
  misc_feature 1..21: note = HBV-targeting guide sequence portion
  source 1..21: mol_type = other RNA
agagtctagactcgtggtgga

SEQ ID NO: 7226 - RNA, 21 nt, synthetic construct
  misc_feature 1..21: note = HBV-targeting guide sequence portion
  source 1..21: mol_type = other RNA
agagtgagaggcctgtatctc

SEQ ID NO: 7227 - RNA, 21 nt, synthetic construct
  misc_feature 1..21: note = HBV-targeting guide sequence portion
  source 1..21: mol_type = other RNA
agagtgtcaacacatagcgcc

SEQ ID NO: 7228 - RNA, 21 nt, synthetic construct
  misc_feature 1..21: note = HBV-targeting guide sequence portion
  source 1..21: mol_type = other RNA
agagtgtgtaaatagtgtcta

SEQ ID NO: 7229 - RNA, 21 nt, synthetic construct
  misc_feature 1..21: note = HBV-targeting guide sequence portion
  source 1..21: mol_type = other RNA
agagttgtcagtcccgagaat

SEQ ID NO: 7230 - RNA, 21 nt, synthetic construct
  misc_feature 1..21: note = HBV-targeting guide sequence portion
  source 1..21: mol_type = other RNA
agatacaggcctctcactctg

SEQ ID NO: 7231 - RNA, 21 nt, synthetic construct
  misc_feature 1..21: note = HBV-targeting guide sequence portion
  source 1..21: mol_type = other RNA
agataccgccgcagctctgta

SEQ ID NO: 7232 - RNA, 21 nt, synthetic construct
  misc_feature 1..21: note = HBV-targeting guide sequence portion
  source 1..21: mol_type = other RNA
agatattatcaaaaaatgtga

SEQ ID NO: 7233 - RNA, 21 nt, synthetic construct
  misc_feature 1..21: note = HBV-targeting guide sequence portion
  source 1..21: mol_type = other RNA
agatcaagcatctagggacct

SEQ ID NO: 7234 - RNA, 21 nt, synthetic construct
  misc_feature 1..21: note = HBV-targeting guide sequence portion
  source 1..21: mol_type = other RNA
agatcattaatctaatctcct

SEQ ID NO: 7235 - RNA, 21 nt, synthetic construct
  misc_feature 1..21: note = HBV-targeting guide sequence portion
  source 1..21: mol_type = other RNA
agatcccagagtgagaggcct

SEQ ID NO: 7236 - RNA, 21 nt, synthetic construct
  misc_feature 1..21: note = HBV-targeting guide sequence portion
  source 1..21: mol_type = other RNA
agatccccgagattgagatct

SEQ ID NO: 7237 - RNA, 21 nt, synthetic construct
  misc_feature 1..21: note = HBV-targeting guide sequence portion
  source 1..21: mol_type = other RNA
agatctcaatcgccgcgtcgc

SEQ ID NO: 7238 - RNA, 21 nt, synthetic construct
  misc_feature 1..21: note = HBV-targeting guide sequence portion
  source 1..21: mol_type = other RNA
agatctcaatctcggggatct

SEQ ID NO: 7239 - RNA, 21 nt, synthetic construct
  misc_feature 1..21: note = HBV-targeting guide sequence portion
  source 1..21: mol_type = other RNA
agatctcgtacggaaggaaag

SEQ ID NO: 7240 - RNA, 21 nt, synthetic construct
  misc_feature 1..21: note = HBV-targeting guide sequence portion
  source 1..21: mol_type = other RNA
agatcttcgtctgcgaggcga

SEQ ID NO: 7241 - RNA, 21 nt, synthetic construct
  misc_feature 1..21: note = HBV-targeting guide sequence portion
  source 1..21: mol_type = other RNA
agatcttctagataccgccgc

SEQ ID NO: 7242 - RNA, 21 nt, synthetic construct
  misc_feature 1..21: note = HBV-targeting guide sequence portion
  source 1..21: mol_type = other RNA
agatcttctgcgacgcggcga

SEQ ID NO: 7243 - RNA, 21 nt, synthetic construct
  misc_feature 1..21: note = HBV-targeting guide sequence portion
  source 1..21: mol_type = other RNA
agatgagaaggcacagacggg

SEQ ID NO: 7244 - RNA, 21 nt, synthetic construct
  misc_feature 1..21: note = HBV-targeting guide sequence portion
  source 1..21: mol_type = other RNA
agatgaggcatagcagcagga

SEQ ID NO: 7245 - RNA, 21 nt, synthetic construct
  misc_feature 1..21: note = HBV-targeting guide sequence portion
  source 1..21: mol_type = other RNA
agatgataaaacgccgcagac

SEQ ID NO: 7246 - RNA, 21 nt, synthetic construct
  misc_feature 1..21: note = HBV-targeting guide sequence portion
  source 1..21: mol_type = other RNA
agatgattaggcagaggtgaa

SEQ ID NO: 7247 - RNA, 21 nt, synthetic construct
  misc_feature 1..21: note = HBV-targeting guide sequence portion
  source 1..21: mol_type = other RNA
agatgctgtacagacttggcc

SEQ ID NO: 7248 - RNA, 21 nt, synthetic construct
  misc_feature 1..21: note = HBV-targeting guide sequence portion
  source 1..21: mol_type = other RNA
agatgcttgatcttctaaatt

SEQ ID NO: 7249 - RNA, 21 nt, synthetic construct
  misc_feature 1..21: note = HBV-targeting guide sequence portion
  source 1..21: mol_type = other RNA
agatggggttattctcttaat

SEQ ID NO: 7250 - RNA, 21 nt, synthetic construct
  misc_feature 1..21: note = HBV-targeting guide sequence portion
  source 1..21: mol_type = other RNA
agatgggtcgtccgcgggatt

SEQ ID NO: 7251 - RNA, 21 nt, synthetic construct
  misc_feature 1..21: note = HBV-targeting guide sequence portion
  source 1..21: mol_type = other RNA
agatgtatattaggaaaagag

SEQ ID NO: 7252 - RNA, 21 nt, synthetic construct
  misc_feature 1..21: note = HBV-targeting guide sequence portion
  source 1..21: mol_type = other RNA
agatgttctggataataaggt

SEQ ID NO: 7253 - RNA, 21 nt, synthetic construct
  misc_feature 1..21: note = HBV-targeting guide sequence portion
  source 1..21: mol_type = other RNA
agattaatgatctttgtacta

SEQ ID NO: 7254 - RNA, 21 nt, synthetic construct
  misc_feature 1..21: note = HBV-targeting guide sequence portion
  source 1..21: mol_type = other RNA
agattagattaatgatctttg

SEQ ID NO: 7255 - RNA, 21 nt, synthetic construct
  misc_feature 1..21: note = HBV-targeting guide sequence portion
  source 1..21: mol_type = other RNA
agattctgccccatgctgtag

SEQ ID NO: 7256 - RNA, 21 nt, synthetic construct
  misc_feature 1..21: note = HBV-targeting guide sequence portion
  source 1..21: mol_type = other RNA
agattgaatacatgcatacaa

SEQ ID NO: 7257 - RNA, 21 nt, synthetic construct
  misc_feature 1..21: note = HBV-targeting guide sequence portion
  source 1..21: mol_type = other RNA
agattgacgatatgtgagagg

SEQ ID NO: 7258 - RNA, 21 nt, synthetic construct
  misc_feature 1..21: note = HBV-targeting guide sequence portion
  source 1..21: mol_type = other RNA
agattgagatcttctgcgacg

SEQ ID NO: 7259 - RNA, 21 nt, synthetic construct
  misc_feature 1..21: note = HBV-targeting guide sequence portion
  source 1..21: mol_type = other RNA
agattgggacttcaatcccaa

SEQ ID NO: 7260 - RNA, 21 nt, synthetic construct
  misc_feature 1..21: note = HBV-targeting guide sequence portion
  source 1..21: mol_type = other RNA
agcaaaacaagcggctaggag

SEQ ID NO: 7261 - RNA, 21 nt, synthetic construct
  misc_feature 1..21: note = HBV-targeting guide sequence portion
  source 1..21: mol_type = other RNA
agcaaaacccagaagacccac

SEQ ID NO: 7262 - RNA, 21 nt, synthetic construct
  misc_feature 1..21: note = HBV-targeting guide sequence portion
  source 1..21: mol_type = other RNA
agcaaacacttggcacagacc

SEQ ID NO: 7263 - RNA, 21 nt, synthetic construct
  misc_feature 1..21: note = HBV-targeting guide sequence portion
  source 1..21: mol_type = other RNA
agcaaacattctcgggactga

SEQ ID NO: 7264 - RNA, 21 nt, synthetic construct
  misc_feature 1..21: note = HBV-targeting guide sequence portion
  source 1..21: mol_type = other RNA
agcaaactccaacaatccaga

SEQ ID NO: 7265 - RNA, 21 nt, synthetic construct
  misc_feature 1..21: note = HBV-targeting guide sequence portion
  source 1..21: mol_type = other RNA
agcaaagaattgcttgcctga

SEQ ID NO: 7266 - RNA, 21 nt, synthetic construct
  misc_feature 1..21: note = HBV-targeting guide sequence portion
  source 1..21: mol_type = other RNA
agcaaatccgcctcctgcctc

SEQ ID NO: 7267 - RNA, 21 nt, synthetic construct
  misc_feature 1..21: note = HBV-targeting guide sequence portion
  source 1..21: mol_type = other RNA
agcaacaggagggatacatag

SEQ ID NO: 7268 - RNA, 21 nt, synthetic construct
  misc_feature 1..21: note = HBV-targeting guide sequence portion
  source 1..21: mol_type = other RNA
agcaatcctctgggattcttt

SEQ ID NO: 7269 - RNA, 21 nt, synthetic construct
  misc_feature 1..21: note = HBV-targeting guide sequence portion
  source 1..21: mol_type = other RNA
agcaattctttgctggggaga

SEQ ID NO: 7270 - RNA, 21 nt, synthetic construct
  misc_feature 1..21: note = HBV-targeting guide sequence portion
  source 1..21: mol_type = other RNA
agcacagcctagcagccatgg

SEQ ID NO: 7271 - RNA, 21 nt, synthetic construct
  misc_feature 1..21: note = HBV-targeting guide sequence portion
  source 1..21: mol_type = other RNA
agcaccatgcaactttttcac

SEQ ID NO: 7272 - RNA, 21 nt, synthetic construct
  misc_feature 1..21: note = HBV-targeting guide sequence portion
  source 1..21: mol_type = other RNA
agcacgggaccctgcagaacc

SEQ ID NO: 7273 - RNA, 21 nt, synthetic construct
  misc_feature 1..21: note = HBV-targeting guide sequence portion
  source 1..21: mol_type = other RNA
agcagcaggatgaagaggaag

SEQ ID NO: 7274 - RNA, 21 nt, synthetic construct
  misc_feature 1..21: note = HBV-targeting guide sequence portion
  source 1..21: mol_type = other RNA
agcagccatgggaacgatgta

SEQ ID NO: 7275 - RNA, 21 nt, synthetic construct
  misc_feature 1..21: note = HBV-targeting guide sequence portion
  source 1..21: mol_type = other RNA
agcaggagtcgtgcaggttct

SEQ ID NO: 7276 - RNA, 21 nt, synthetic construct
  misc_feature 1..21: note = HBV-targeting guide sequence portion
  source 1..21: mol_type = other RNA
agcaggataaccacattgtgt

SEQ ID NO: 7277 - RNA, 21 nt, synthetic construct
  misc_feature 1..21: note = HBV-targeting guide sequence portion
  source 1..21: mol_type = other RNA
agcaggatgaagaggaagatg

SEQ ID NO: 7278 - RNA, 21 nt, synthetic construct
  misc_feature 1..21: note = HBV-targeting guide sequence portion
  source 1..21: mol_type = other RNA
agcaggcataatcaatttcaa

SEQ ID NO: 7279 - RNA, 21 nt, synthetic construct
  misc_feature 1..21: note = HBV-targeting guide sequence portion
  source 1..21: mol_type = other RNA
agcaggctttcactttttcgc

SEQ ID NO: 7280 - RNA, 21 nt, synthetic construct
  misc_feature 1..21: note = HBV-targeting guide sequence portion
  source 1..21: mol_type = other RNA
agcagggagatacaggcctct

SEQ ID NO: 7281 - RNA, 21 nt, synthetic construct
  misc_feature 1..21: note = HBV-targeting guide sequence portion
  source 1..21: mol_type = other RNA
agcaggggtcctaggaatcct

SEQ ID NO: 7282 - RNA, 21 nt, synthetic construct
  misc_feature 1..21: note = HBV-targeting guide sequence portion
  source 1..21: mol_type = other RNA
agcatctagggacctagtagt

SEQ ID NO: 7283 - RNA, 21 nt, synthetic construct
  misc_feature 1..21: note = HBV-targeting guide sequence portion
  source 1..21: mol_type = other RNA
agcatcttgagtccctttata

SEQ ID NO: 7284 - RNA, 21 nt, synthetic construct
  misc_feature 1..21: note = HBV-targeting guide sequence portion
  source 1..21: mol_type = other RNA
agcatggggcagaatctttcc

SEQ ID NO: 7285 - RNA, 21 nt, synthetic construct
  misc_feature 1..21: note = HBV-targeting guide sequence portion
  source 1..21: mol_type = other RNA
agcattcgggctagggttcac

SEQ ID NO: 7286 - RNA, 21 nt, synthetic construct
  misc_feature 1..21: note = HBV-targeting guide sequence portion
  source 1..21: mol_type = other RNA
agcattgttcacctcaccata

SEQ ID NO: 7287 - RNA, 21 nt, synthetic construct
  misc_feature 1..21: note = HBV-targeting guide sequence portion
  source 1..21: mol_type = other RNA
agccaaacagtgggggaaagc

SEQ ID NO: 7288 - RNA, 21 nt, synthetic construct
  misc_feature 1..21: note = HBV-targeting guide sequence portion
  source 1..21: mol_type = other RNA
agccaagagaaacgggctgag

SEQ ID NO: 7289 - RNA, 21 nt, synthetic construct
  misc_feature 1..21: note = HBV-targeting guide sequence portion
  source 1..21: mol_type = other RNA
agccaccagcagggagataca

SEQ ID NO: 7290 - RNA, 21 nt, synthetic construct
  misc_feature 1..21: note = HBV-targeting guide sequence portion
  source 1..21: mol_type = other RNA
agccacccaaggcacagcttg

SEQ ID NO: 7291 - RNA, 21 nt, synthetic construct
  misc_feature 1..21: note = HBV-targeting guide sequence portion
  source 1..21: mol_type = other RNA
agccatgggaacgatgtatat

SEQ ID NO: 7292 - RNA, 21 nt, synthetic construct
  misc_feature 1..21: note = HBV-targeting guide sequence portion
  source 1..21: mol_type = other RNA
agcccaggatgatgggatggg

SEQ ID NO: 7293 - RNA, 21 nt, synthetic construct
  misc_feature 1..21: note = HBV-targeting guide sequence portion
  source 1..21: mol_type = other RNA
agcccatgaaattaagagaat

SEQ ID NO: 7294 - RNA, 21 nt, synthetic construct
  misc_feature 1..21: note = HBV-targeting guide sequence portion
  source 1..21: mol_type = other RNA
agccccaaccagtgggggttg

SEQ ID NO: 7295 - RNA, 21 nt, synthetic construct
  misc_feature 1..21: note = HBV-targeting guide sequence portion
  source 1..21: mol_type = other RNA
agccccgtaaaatttcccacc

SEQ ID NO: 7296 - RNA, 21 nt, synthetic construct
  misc_feature 1..21: note = HBV-targeting guide sequence portion
  source 1..21: mol_type = other RNA
agcccgaatgctccagctcct

SEQ ID NO: 7297 - RNA, 21 nt, synthetic construct
  misc_feature 1..21: note = HBV-targeting guide sequence portion
  source 1..21: mol_type = other RNA
agcccgtttctcttggctcag

SEQ ID NO: 7298 - RNA, 21 nt, synthetic construct
  misc_feature 1..21: note = HBV-targeting guide sequence portion
  source 1..21: mol_type = other RNA
agccctacgaaccactgaaca

SEQ ID NO: 7299 - RNA, 21 nt, synthetic construct
  misc_feature 1..21: note = HBV-targeting guide sequence portion
  source 1..21: mol_type = other RNA
agccctcaggctcagggcata

SEQ ID NO: 7300 - RNA, 21 nt, synthetic construct
  misc_feature 1..21: note = HBV-targeting guide sequence portion
  source 1..21: mol_type = other RNA
agccgcttgttttgctcgcag

SEQ ID NO: 7301 - RNA, 21 nt, synthetic construct
  misc_feature 1..21: note = HBV-targeting guide sequence portion
  source 1..21: mol_type = other RNA
agccggaaaggttccacgcat

SEQ ID NO: 7302 - RNA, 21 nt, synthetic construct
  misc_feature 1..21: note = HBV-targeting guide sequence portion
  source 1..21: mol_type = other RNA
agccggtctggagcaaacatt

SEQ ID NO: 7303 - RNA, 21 nt, synthetic construct
  misc_feature 1..21: note = HBV-targeting guide sequence portion
  source 1..21: mol_type = other RNA
agcctaccccgctgtctccac

SEQ ID NO: 7304 - RNA, 21 nt, synthetic construct
  misc_feature 1..21: note = HBV-targeting guide sequence portion
  source 1..21: mol_type = other RNA
agcctagcagccatgggaacg

SEQ ID NO: 7305 - RNA, 21 nt, synthetic construct
  misc_feature 1..21: note = HBV-targeting guide sequence portion
  source 1..21: mol_type = other RNA
agcctccaagctgtgccttgg

SEQ ID NO: 7306 - RNA, 21 nt, synthetic construct
  misc_feature 1..21: note = HBV-targeting guide sequence portion
  source 1..21: mol_type = other RNA
agcctcctagtacaaagatca

SEQ ID NO: 7307 - RNA, 21 nt, synthetic construct
  misc_feature 1..21: note = HBV-targeting guide sequence portion
  source 1..21: mol_type = other RNA
agcctgagggctccaccccaa

SEQ ID NO: 7308 - RNA, 21 nt, synthetic construct
  misc_feature 1..21: note = HBV-targeting guide sequence portion
  source 1..21: mol_type = other RNA
agcctgcttagattgaataca

SEQ ID NO: 7309 - RNA, 21 nt, synthetic construct
  misc_feature 1..21: note = HBV-targeting guide sequence portion
  source 1..21: mol_type = other RNA
agccttcagagcaaactccaa

SEQ ID NO: 7310 - RNA, 21 nt, synthetic construct
  misc_feature 1..21: note = HBV-targeting guide sequence portion
  source 1..21: mol_type = other RNA
agcgaagtgcacacggtccgg

SEQ ID NO: 7311 - RNA, 21 nt, synthetic construct
  misc_feature 1..21: note = HBV-targeting guide sequence portion
  source 1..21: mol_type = other RNA
agcgataaccaggacaagttg

SEQ ID NO: 7312 - RNA, 21 nt, synthetic construct
  misc_feature 1..21: note = HBV-targeting guide sequence portion
  source 1..21: mol_type = other RNA
agcgcagggtccccaatcctc

SEQ ID NO: 7313 - RNA, 21 nt, synthetic construct
  misc_feature 1..21: note = HBV-targeting guide sequence portion
  source 1..21: mol_type = other RNA
agcgcatgcgtggaacctttc

SEQ ID NO: 7314 - RNA, 21 nt, synthetic construct
  misc_feature 1..21: note = HBV-targeting guide sequence portion
  source 1..21: mol_type = other RNA
agcgccgacgggacgtaaaca

SEQ ID NO: 7315 - RNA, 21 nt, synthetic construct
  misc_feature 1..21: note = HBV-targeting guide sequence portion
  source 1..21: mol_type = other RNA
agcgcctcattctgtgggtca

SEQ ID NO: 7316 - RNA, 21 nt, synthetic construct
  misc_feature 1..21: note = HBV-targeting guide sequence portion
  source 1..21: mol_type = other RNA
agcggcctcgagatgggtcgt

SEQ ID NO: 7317 - RNA, 21 nt, synthetic construct
  misc_feature 1..21: note = HBV-targeting guide sequence portion
  source 1..21: mol_type = other RNA
agcggctaggagttccgcagt

SEQ ID NO: 7318 - RNA, 21 nt, synthetic construct
  misc_feature 1..21: note = HBV-targeting guide sequence portion
  source 1..21: mol_type = other RNA
agcgggcctacaaactgttca

SEQ ID NO: 7319 - RNA, 21 nt, synthetic construct
  misc_feature 1..21: note = HBV-targeting guide sequence portion
  source 1..21: mol_type = other RNA
agcggggtaggctgccgtcct

SEQ ID NO: 7320 - RNA, 21 nt, synthetic construct
  misc_feature 1..21: note = HBV-targeting guide sequence portion
  source 1..21: mol_type = other RNA
agcggtataaagggactcaag

SEQ ID NO: 7321 - RNA, 21 nt, synthetic construct
  misc_feature 1..21: note = HBV-targeting guide sequence portion
  source 1..21: mol_type = other RNA
agctacagcatggggcagaat

SEQ ID NO: 7322 - RNA, 21 nt, synthetic construct
  misc_feature 1..21: note = HBV-targeting guide sequence portion
  source 1..21: mol_type = other RNA
agctacctgggtgggtactaa

SEQ ID NO: 7323 - RNA, 21 nt, synthetic construct
  misc_feature 1..21: note = HBV-targeting guide sequence portion
  source 1..21: mol_type = other RNA
agctactgtggagttactctc

SEQ ID NO: 7324 - RNA, 21 nt, synthetic construct
  misc_feature 1..21: note = HBV-targeting guide sequence portion
  source 1..21: mol_type = other RNA
agctagagtcattagttctcc

SEQ ID NO: 7325 - RNA, 21 nt, synthetic construct
  misc_feature 1..21: note = HBV-targeting guide sequence portion
  source 1..21: mol_type = other RNA
agctccaaattctttatatgg

SEQ ID NO: 7326 - RNA, 21 nt, synthetic construct
  misc_feature 1..21: note = HBV-targeting guide sequence portion
  source 1..21: mol_type = other RNA
agctcctaccttgttggcgtc

SEQ ID NO: 7327 - RNA, 21 nt, synthetic construct
  misc_feature 1..21: note = HBV-targeting guide sequence portion
  source 1..21: mol_type = other RNA
agctctgtatcgggatgcctt

SEQ ID NO: 7328 - RNA, 21 nt, synthetic construct
  misc_feature 1..21: note = HBV-targeting guide sequence portion
  source 1..21: mol_type = other RNA
agctcttgttcccaagaatat

SEQ ID NO: 7329 - RNA, 21 nt, synthetic construct
  misc_feature 1..21: note = HBV-targeting guide sequence portion
  source 1..21: mol_type = other RNA
agctgcggcggtatctagaag

SEQ ID NO: 7330 - RNA, 21 nt, synthetic construct
  misc_feature 1..21: note = HBV-targeting guide sequence portion
  source 1..21: mol_type = other RNA
agctggagcattcgggctagg

SEQ ID NO: 7331 - RNA, 21 nt, synthetic construct
  misc_feature 1..21: note = HBV-targeting guide sequence portion
  source 1..21: mol_type = other RNA
agctggaggagtgcgaatcca

SEQ ID NO: 7332 - RNA, 21 nt, synthetic construct
  misc_feature 1..21: note = HBV-targeting guide sequence portion
  source 1..21: mol_type = other RNA
agctgtgccttgggtggcttt

SEQ ID NO: 7333 - RNA, 21 nt, synthetic construct
  misc_feature 1..21: note = HBV-targeting guide sequence portion
  source 1..21: mol_type = other RNA
agcttatagaccaccaaatgc

SEQ ID NO: 7334 - RNA, 21 nt, synthetic construct
  misc_feature 1..21: note = HBV-targeting guide sequence portion
  source 1..21: mol_type = other RNA
agcttggaggcttgaacagta

SEQ ID NO: 7335 - RNA, 21 nt, synthetic construct
  misc_feature 1..21: note = HBV-targeting guide sequence portion
  source 1..21: mol_type = other RNA
aggaaaaccccgcctgtaaca

SEQ ID NO: 7336 - RNA, 21 nt, synthetic construct
  misc_feature 1..21: note = HBV-targeting guide sequence portion
  source 1..21: mol_type = other RNA
aggaaaagagggtgttttcca

SEQ ID NO: 7337 - RNA, 21 nt, synthetic construct
  misc_feature 1..21: note = HBV-targeting guide sequence portion
  source 1..21: mol_type = other RNA
aggaaagaagtcagaaggcaa

SEQ ID NO: 7338 - RNA, 21 nt, synthetic construct
  misc_feature 1..21: note = HBV-targeting guide sequence portion
  source 1..21: mol_type = other RNA
aggaacagtaaaccctgttcc

SEQ ID NO: 7339 - RNA, 21 nt, synthetic construct
  misc_feature 1..21: note = HBV-targeting guide sequence portion
  source 1..21: mol_type = other RNA
aggaacctctatgtatccctc

SEQ ID NO: 7340 - RNA, 21 nt, synthetic construct
  misc_feature 1..21: note = HBV-targeting guide sequence portion
  source 1..21: mol_type = other RNA
aggaagatgataaaacgccgc

SEQ ID NO: 7341 - RNA, 21 nt, synthetic construct
  misc_feature 1..21: note = HBV-targeting guide sequence portion
  source 1..21: mol_type = other RNA
aggaatcctgatgtgatgttc

SEQ ID NO: 7342 - RNA, 21 nt, synthetic construct
  misc_feature 1..21: note = HBV-targeting guide sequence portion
  source 1..21: mol_type = other RNA
aggaattttccgaaagcccag

SEQ ID NO: 7343 - RNA, 21 nt, synthetic construct
  misc_feature 1..21: note = HBV-targeting guide sequence portion
  source 1..21: mol_type = other RNA
aggacaacagagttgtcagtc

SEQ ID NO: 7344 - RNA, 21 nt, synthetic construct
  misc_feature 1..21: note = HBV-targeting guide sequence portion
  source 1..21: mol_type = other RNA
aggacaagttggaggacagga

SEQ ID NO: 7345 - RNA, 21 nt, synthetic construct
  misc_feature 1..21: note = HBV-targeting guide sequence portion
  source 1..21: mol_type = other RNA
aggacagacgggaaacatacc

SEQ ID NO: 7346 - RNA, 21 nt, synthetic construct
  misc_feature 1..21: note = HBV-targeting guide sequence portion
  source 1..21: mol_type = other RNA
aggacaggaggttggtgagtg

SEQ ID NO: 7347 - RNA, 21 nt, synthetic construct
  misc_feature 1..21: note = HBV-targeting guide sequence portion
  source 1..21: mol_type = other RNA
aggacatgaacaagagatgat

SEQ ID NO: 7348 - RNA, 21 nt, synthetic construct
  misc_feature 1..21: note = HBV-targeting guide sequence portion
  source 1..21: mol_type = other RNA
aggacccctgctcgtgttaca

SEQ ID NO: 7349 - RNA, 21 nt, synthetic construct
  misc_feature 1..21: note = HBV-targeting guide sequence portion
  source 1..21: mol_type = other RNA
aggaccgtttctcttccaaaa

SEQ ID NO: 7350 - RNA, 21 nt, synthetic construct
  misc_feature 1..21: note = HBV-targeting guide sequence portion
  source 1..21: mol_type = other RNA
aggacgacagggccccaagcg

SEQ ID NO: 7351 - RNA, 21 nt, synthetic construct
  misc_feature 1..21: note = HBV-targeting guide sequence portion
  source 1..21: mol_type = other RNA
aggacggcagcctaccccgct

SEQ ID NO: 7352 - RNA, 21 nt, synthetic construct
  misc_feature 1..21: note = HBV-targeting guide sequence portion
  source 1..21: mol_type = other RNA
aggacgtcccgcgcaggatcc

SEQ ID NO: 7353 - RNA, 21 nt, synthetic construct
  misc_feature 1..21: note = HBV-targeting guide sequence portion
  source 1..21: mol_type = other RNA
aggactcttggactctctgca

SEQ ID NO: 7354 - RNA, 21 nt, synthetic construct
  misc_feature 1..21: note = HBV-targeting guide sequence portion
  source 1..21: mol_type = other RNA
aggagactccaaggcatcccg

SEQ ID NO: 7355 - RNA, 21 nt, synthetic construct
  misc_feature 1..21: note = HBV-targeting guide sequence portion
  source 1..21: mol_type = other RNA
aggagattagattaatgatct

SEQ ID NO: 7356 - RNA, 21 nt, synthetic construct
  misc_feature 1..21: note = HBV-targeting guide sequence portion
  source 1..21: mol_type = other RNA
aggagccggaaaggttccacg

SEQ ID NO: 7357 - RNA, 21 nt, synthetic construct
  misc_feature 1..21: note = HBV-targeting guide sequence portion
  source 1..21: mol_type = other RNA
aggagctggagcattcgggct

SEQ ID NO: 7358 - RNA, 21 nt, synthetic construct
  misc_feature 1..21: note = HBV-targeting guide sequence portion
  source 1..21: mol_type = other RNA
aggaggcggatttgctggcaa

SEQ ID NO: 7359 - RNA, 21 nt, synthetic construct
  misc_feature 1..21: note = HBV-targeting guide sequence portion
  source 1..21: mol_type = other RNA
aggaggctgtaggcataaatt

SEQ ID NO: 7360 - RNA, 21 nt, synthetic construct
  misc_feature 1..21: note = HBV-targeting guide sequence portion
  source 1..21: mol_type = other RNA
aggagggatacatagaggttc

SEQ ID NO: 7361 - RNA, 21 nt, synthetic construct
  misc_feature 1..21: note = HBV-targeting guide sequence portion
  source 1..21: mol_type = other RNA
aggaggttggtgagtgattgg

SEQ ID NO: 7362 - RNA, 21 nt, synthetic construct
  misc_feature 1..21: note = HBV-targeting guide sequence portion
  source 1..21: mol_type = other RNA
aggagtcgtgcaggttctgca

SEQ ID NO: 7363 - RNA, 21 nt, synthetic construct
  misc_feature 1..21: note = HBV-targeting guide sequence portion
  source 1..21: mol_type = other RNA
aggagtgcgaatccacactcc

SEQ ID NO: 7364 - RNA, 21 nt, synthetic construct
  misc_feature 1..21: note = HBV-targeting guide sequence portion
  source 1..21: mol_type = other RNA
aggagttccgcagtatggatc

SEQ ID NO: 7365 - RNA, 21 nt, synthetic construct
  misc_feature 1..21: note = HBV-targeting guide sequence portion
  source 1..21: mol_type = other RNA
aggagttgggggaggagatta

SEQ ID NO: 7366 - RNA, 21 nt, synthetic construct
  misc_feature 1..21: note = HBV-targeting guide sequence portion
  source 1..21: mol_type = other RNA
aggataaaacctagcaggcat

SEQ ID NO: 7367 - RNA, 21 nt, synthetic construct
  misc_feature 1..21: note = HBV-targeting guide sequence portion
  source 1..21: mol_type = other RNA
aggataaccacattgtgtaaa

SEQ ID NO: 7368 - RNA, 21 nt, synthetic construct
  misc_feature 1..21: note = HBV-targeting guide sequence portion
  source 1..21: mol_type = other RNA
aggataggggcatttggtggt

SEQ ID NO: 7369 - RNA, 21 nt, synthetic construct
  misc_feature 1..21: note = HBV-targeting guide sequence portion
  source 1..21: mol_type = other RNA
aggatcatcaaccaccagcac

SEQ ID NO: 7370 - RNA, 21 nt, synthetic construct
  misc_feature 1..21: note = HBV-targeting guide sequence portion
  source 1..21: mol_type = other RNA
aggatccagttggcagcacag

SEQ ID NO: 7371 - RNA, 21 nt, synthetic construct
  misc_feature 1..21: note = HBV-targeting guide sequence portion
  source 1..21: mol_type = other RNA
aggatccctggccagacgcca

SEQ ID NO: 7372 - RNA, 21 nt, synthetic construct
  misc_feature 1..21: note = HBV-targeting guide sequence portion
  source 1..21: mol_type = other RNA
aggatgaagaggaagatgata

SEQ ID NO: 7373 - RNA, 21 nt, synthetic construct
  misc_feature 1..21: note = HBV-targeting guide sequence portion
  source 1..21: mol_type = other RNA
aggatgagtgtttctcagagg

SEQ ID NO: 7374 - RNA, 21 nt, synthetic construct
  misc_feature 1..21: note = HBV-targeting guide sequence portion
  source 1..21: mol_type = other RNA
aggatgatgggatgggaatac

SEQ ID NO: 7375 - RNA, 21 nt, synthetic construct
  misc_feature 1..21: note = HBV-targeting guide sequence portion
  source 1..21: mol_type = other RNA
aggattcctaggacccctgct

SEQ ID NO: 7376 - RNA, 21 nt, synthetic construct
  misc_feature 1..21: note = HBV-targeting guide sequence portion
  source 1..21: mol_type = other RNA
aggattcttgtcaacaaggaa

SEQ ID NO: 7377 - RNA, 21 nt, synthetic construct
  misc_feature 1..21: note = HBV-targeting guide sequence portion
  source 1..21: mol_type = other RNA
aggattgctggtggaaagatt

SEQ ID NO: 7378 - RNA, 21 nt, synthetic construct
  misc_feature 1..21: note = HBV-targeting guide sequence portion
  source 1..21: mol_type = other RNA
aggattggggaccctgcgctg

SEQ ID NO: 7379 - RNA, 21 nt, synthetic construct
  misc_feature 1..21: note = HBV-targeting guide sequence portion
  source 1..21: mol_type = other RNA
aggcaaaaacgagagtaactc

SEQ ID NO: 7380 - RNA, 21 nt, synthetic construct
  misc_feature 1..21: note = HBV-targeting guide sequence portion
  source 1..21: mol_type = other RNA
aggcaacggccaggtctgtgc

SEQ ID NO: 7381 - RNA, 21 nt, synthetic construct
  misc_feature 1..21: note = HBV-targeting guide sequence portion
  source 1..21: mol_type = other RNA
aggcaagcaattctttgctgg

SEQ ID NO: 7382 - RNA, 21 nt, synthetic construct
  misc_feature 1..21: note = HBV-targeting guide sequence portion
  source 1..21: mol_type = other RNA
aggcacagacggggagtccgc

SEQ ID NO: 7383 - RNA, 21 nt, synthetic construct
  misc_feature 1..21: note = HBV-targeting guide sequence portion
  source 1..21: mol_type = other RNA
aggcacagcttggaggcttga

SEQ ID NO: 7384 - RNA, 21 nt, synthetic construct
  misc_feature 1..21: note = HBV-targeting guide sequence portion
  source 1..21: mol_type = other RNA
aggcagagaagaggacgacag

SEQ ID NO: 7385 - RNA, 21 nt, synthetic construct
  misc_feature 1..21: note = HBV-targeting guide sequence portion
  source 1..21: mol_type = other RNA
aggcagaggtgaaaaagttgc

SEQ ID NO: 7386 - RNA, 21 nt, synthetic construct
  misc_feature 1..21: note = HBV-targeting guide sequence portion
  source 1..21: mol_type = other RNA
aggcaggaggcggatttgctg

SEQ ID NO: 7387 - RNA, 21 nt, synthetic construct
  misc_feature 1..21: note = HBV-targeting guide sequence portion
  source 1..21: mol_type = other RNA
aggcaggtcccctagaagaag

SEQ ID NO: 7388 - RNA, 21 nt, synthetic construct
  misc_feature 1..21: note = HBV-targeting guide sequence portion
  source 1..21: mol_type = other RNA
aggcagtagtcggaacagggt

SEQ ID NO: 7389 - RNA, 21 nt, synthetic construct
  misc_feature 1..21: note = HBV-targeting guide sequence portion
  source 1..21: mol_type = other RNA
aggcataaattggtctgcgca

SEQ ID NO: 7390 - RNA, 21 nt, synthetic construct
  misc_feature 1..21: note = HBV-targeting guide sequence portion
  source 1..21: mol_type = other RNA
aggcataatcaatttcaaccg

SEQ ID NO: 7391 - RNA, 21 nt, synthetic construct
  misc_feature 1..21: note = HBV-targeting guide sequence portion
  source 1..21: mol_type = other RNA
aggcatacttcaaagactgtt

SEQ ID NO: 7392 - RNA, 21 nt, synthetic construct
  misc_feature 1..21: note = HBV-targeting guide sequence portion
  source 1..21: mol_type = other RNA
aggcatagcagcaggatgaag

SEQ ID NO: 7393 - RNA, 21 nt, synthetic construct
  misc_feature 1..21: note = HBV-targeting guide sequence portion
  source 1..21: mol_type = other RNA
aggcatcccgatacagagctg

SEQ ID NO: 7394 - RNA, 21 nt, synthetic construct
  misc_feature 1..21: note = HBV-targeting guide sequence portion
  source 1..21: mol_type = other RNA
aggccatcagcgcatgcgtgg

SEQ ID NO: 7395 - RNA, 21 nt, synthetic construct
  misc_feature 1..21: note = HBV-targeting guide sequence portion
  source 1..21: mol_type = other RNA
aggcccactcccataggaatt

SEQ ID NO: 7396 - RNA, 21 nt, synthetic construct
  misc_feature 1..21: note = HBV-targeting guide sequence portion
  source 1..21: mol_type = other RNA
aggcccatatgagtgttgaca

SEQ ID NO: 7397 - RNA, 21 nt, synthetic construct
  misc_feature 1..21: note = HBV-targeting guide sequence portion
  source 1..21: mol_type = other RNA
aggcccgcttacagttaatga

SEQ ID NO: 7398 - RNA, 21 nt, synthetic construct
  misc_feature 1..21: note = HBV-targeting guide sequence portion
  source 1..21: mol_type = other RNA
aggccgcttggggccctgtcg

SEQ ID NO: 7399 - RNA, 21 nt, synthetic construct
  misc_feature 1..21: note = HBV-targeting guide sequence portion
  source 1..21: mol_type = other RNA
aggcctattgattggaaagtg

SEQ ID NO: 7400 - RNA, 21 nt, synthetic construct
  misc_feature 1..21: note = HBV-targeting guide sequence portion
  source 1..21: mol_type = other RNA
aggcctccgtgcggtggggtg

SEQ ID NO: 7401 - RNA, 21 nt, synthetic construct
  misc_feature 1..21: note = HBV-targeting guide sequence portion
  source 1..21: mol_type = other RNA
aggcctctcactctgggatct

SEQ ID NO: 7402 - RNA, 21 nt, synthetic construct
  misc_feature 1..21: note = HBV-targeting guide sequence portion
  source 1..21: mol_type = other RNA
aggcctgtatctccctgctgg

SEQ ID NO: 7403 - RNA, 21 nt, synthetic construct
  misc_feature 1..21: note = HBV-targeting guide sequence portion
  source 1..21: mol_type = other RNA
aggcctgttaaccgggagttt

SEQ ID NO: 7404 - RNA, 21 nt, synthetic construct
  misc_feature 1..21: note = HBV-targeting guide sequence portion
  source 1..21: mol_type = other RNA
aggccttgtaagttggcgaaa

SEQ ID NO: 7405 - RNA, 21 nt, synthetic construct
  misc_feature 1..21: note = HBV-targeting guide sequence portion
  source 1..21: mol_type = other RNA
aggcctttctgtgtaaacaat

SEQ ID NO: 7406 - RNA, 21 nt, synthetic construct
  misc_feature 1..21: note = HBV-targeting guide sequence portion
  source 1..21: mol_type = other RNA
aggccttttggggtggagccc

SEQ ID NO: 7407 - RNA, 21 nt, synthetic construct
  misc_feature 1..21: note = HBV-targeting guide sequence portion
  source 1..21: mol_type = other RNA
aggcgagggagttcttcttct

SEQ ID NO: 7408 - RNA, 21 nt, synthetic construct
  misc_feature 1..21: note = HBV-targeting guide sequence portion
  source 1..21: mol_type = other RNA
aggcgctatgtgttgacactc

SEQ ID NO: 7409 - RNA, 21 nt, synthetic construct
  misc_feature 1..21: note = HBV-targeting guide sequence portion
  source 1..21: mol_type = other RNA
aggcggatttgctggcaaggt

SEQ ID NO: 7410 - RNA, 21 nt, synthetic construct
  misc_feature 1..21: note = HBV-targeting guide sequence portion
  source 1..21: mol_type = other RNA
aggcggggttttccttgttga

SEQ ID NO: 7411 - RNA, 21 nt, synthetic construct
  misc_feature 1..21: note = HBV-targeting guide sequence portion
  source 1..21: mol_type = other RNA
aggcgggtgttttatataaga

SEQ ID NO: 7412 - RNA, 21 nt, synthetic construct
  misc_feature 1..21: note = HBV-targeting guide sequence portion
  source 1..21: mol_type = other RNA
aggctcagggcataatgcaaa

SEQ ID NO: 7413 - RNA, 21 nt, synthetic construct
  misc_feature 1..21: note = HBV-targeting guide sequence portion
  source 1..21: mol_type = other RNA
aggctgccgtcctgactggcg

SEQ ID NO: 7414 - RNA, 21 nt, synthetic construct
  misc_feature 1..21: note = HBV-targeting guide sequence portion
  source 1..21: mol_type = other RNA
aggctgggtccaactggtggt

SEQ ID NO: 7415 - RNA, 21 nt, synthetic construct
  misc_feature 1..21: note = HBV-targeting guide sequence portion
  source 1..21: mol_type = other RNA
aggctgtaggcataaattggt

SEQ ID NO: 7416 - RNA, 21 nt, synthetic construct
  misc_feature 1..21: note = HBV-targeting guide sequence portion
  source 1..21: mol_type = other RNA
aggctgtgctgccaactggat

SEQ ID NO: 7417 - RNA, 21 nt, synthetic construct
  misc_feature 1..21: note = HBV-targeting guide sequence portion
  source 1..21: mol_type = other RNA
aggcttgaacagtaggacatg

SEQ ID NO: 7418 - RNA, 21 nt, synthetic construct
  misc_feature 1..21: note = HBV-targeting guide sequence portion
  source 1..21: mol_type = other RNA
aggctttcactttttcgccaa

SEQ ID NO: 7419 - RNA, 21 nt, synthetic construct
  misc_feature 1..21: note = HBV-targeting guide sequence portion
  source 1..21: mol_type = other RNA
agggacctagtagtcagttat

SEQ ID NO: 7420 - RNA, 21 nt, synthetic construct
  misc_feature 1..21: note = HBV-targeting guide sequence portion
  source 1..21: mol_type = other RNA
agggactcaagatgctgtaca

SEQ ID NO: 7421 - RNA, 21 nt, synthetic construct
  misc_feature 1..21: note = HBV-targeting guide sequence portion
  source 1..21: mol_type = other RNA
agggagatacaggcctctcac

SEQ ID NO: 7422 - RNA, 21 nt, synthetic construct
  misc_feature 1..21: note = HBV-targeting guide sequence portion
  source 1..21: mol_type = other RNA
agggagttcttcttctagggg

SEQ ID NO: 7423 - RNA, 21 nt, synthetic construct
  misc_feature 1..21: note = HBV-targeting guide sequence portion
  source 1..21: mol_type = other RNA
agggatacatagaggttcctt

SEQ ID NO: 7424 - RNA, 21 nt, synthetic construct
  misc_feature 1..21: note = HBV-targeting guide sequence portion
  source 1..21: mol_type = other RNA
agggatactaacattgagatc

SEQ ID NO: 7425 - RNA, 21 nt, synthetic construct
  misc_feature 1..21: note = HBV-targeting guide sequence portion
  source 1..21: mol_type = other RNA
agggatccttgttgggattga

SEQ ID NO: 7426 - RNA, 21 nt, synthetic construct
  misc_feature 1..21: note = HBV-targeting guide sequence portion
  source 1..21: mol_type = other RNA
agggcaagtatttggtgaatt

SEQ ID NO: 7427 - RNA, 21 nt, synthetic construct
  misc_feature 1..21: note = HBV-targeting guide sequence portion
  source 1..21: mol_type = other RNA
agggcataatgcaaaccttgc

SEQ ID NO: 7428 - RNA, 21 nt, synthetic construct
  misc_feature 1..21: note = HBV-targeting guide sequence portion
  source 1..21: mol_type = other RNA
agggcatggacattgacccat

SEQ ID NO: 7429 - RNA, 21 nt, synthetic construct
  misc_feature 1..21: note = HBV-targeting guide sequence portion
  source 1..21: mol_type = other RNA
agggcattaaagcaggataac

SEQ ID NO: 7430 - RNA, 21 nt, synthetic construct
  misc_feature 1..21: note = HBV-targeting guide sequence portion
  source 1..21: mol_type = other RNA
agggccccaagcggcctcgag

SEQ ID NO: 7431 - RNA, 21 nt, synthetic construct
  misc_feature 1..21: note = HBV-targeting guide sequence portion
  source 1..21: mol_type = other RNA
agggctccaccccaaaaggcc

SEQ ID NO: 7432 - RNA, 21 nt, synthetic construct
  misc_feature 1..21: note = HBV-targeting guide sequence portion
  source 1..21: mol_type = other RNA
agggctttcccccactgtttg

SEQ ID NO: 7433 - RNA, 21 nt, synthetic construct
  misc_feature 1..21: note = HBV-targeting guide sequence portion
  source 1..21: mol_type = other RNA
aggggacctgcctcgtcgtct

SEQ ID NO: 7434 - RNA, 21 nt, synthetic construct
  misc_feature 1..21: note = HBV-targeting guide sequence portion
  source 1..21: mol_type = other RNA
aggggcagcaaaacccagaag

SEQ ID NO: 7435 - RNA, 21 nt, synthetic construct
  misc_feature 1..21: note = HBV-targeting guide sequence portion
  source 1..21: mol_type = other RNA
aggggcatttggtggtctata

SEQ ID NO: 7436 - RNA, 21 nt, synthetic construct
  misc_feature 1..21: note = HBV-targeting guide sequence portion
  source 1..21: mol_type = other RNA
agggggaactaccgtgtgtct

SEQ ID NO: 7437 - RNA, 21 nt, synthetic construct
  misc_feature 1..21: note = HBV-targeting guide sequence portion
  source 1..21: mol_type = other RNA
aggggtcctaggaatcctgat

SEQ ID NO: 7438 - RNA, 21 nt, synthetic construct
  misc_feature 1..21: note = HBV-targeting guide sequence portion
  source 1..21: mol_type = other RNA
agggtattaaaccttattatc

SEQ ID NO: 7439 - RNA, 21 nt, synthetic construct
  misc_feature 1..21: note = HBV-targeting guide sequence portion
  source 1..21: mol_type = other RNA
agggtccccaatcctcgagaa

SEQ ID NO: 7440 - RNA, 21 nt, synthetic construct
  misc_feature 1..21: note = HBV-targeting guide sequence portion
  source 1..21: mol_type = other RNA
agggtcccgtgctggtggttg

SEQ ID NO: 7441 - RNA, 21 nt, synthetic construct
  misc_feature 1..21: note = HBV-targeting guide sequence portion
  source 1..21: mol_type = other RNA
agggtgttttccaatgagggt

SEQ ID NO: 7442 - RNA, 21 nt, synthetic construct
  misc_feature 1..21: note = HBV-targeting guide sequence portion
  source 1..21: mol_type = other RNA
agggttaaagacaggtacagt

SEQ ID NO: 7443 - RNA, 21 nt, synthetic construct
  misc_feature 1..21: note = HBV-targeting guide sequence portion
  source 1..21: mol_type = other RNA
agggttcaccccaccgcacgg

SEQ ID NO: 7444 - RNA, 21 nt, synthetic construct
  misc_feature 1..21: note = HBV-targeting guide sequence portion
  source 1..21: mol_type = other RNA
agggtttaaatgtacacccaa

SEQ ID NO: 7445 - RNA, 21 nt, synthetic construct
  misc_feature 1..21: note = HBV-targeting guide sequence portion
  source 1..21: mol_type = other RNA
agggtttactgttcctgaact

SEQ ID NO: 7446 - RNA, 21 nt, synthetic construct
  misc_feature 1..21: note = HBV-targeting guide sequence portion
  source 1..21: mol_type = other RNA
aggtacagtagaagaataaag

SEQ ID NO: 7447 - RNA, 21 nt, synthetic construct
  misc_feature 1..21: note = HBV-targeting guide sequence portion
  source 1..21: mol_type = other RNA
aggtagctagagtcattagtt

SEQ ID NO: 7448 - RNA, 21 nt, synthetic construct
  misc_feature 1..21: note = HBV-targeting guide sequence portion
  source 1..21: mol_type = other RNA
aggtaggagctggagcattcg

SEQ ID NO: 7449 - RNA, 21 nt, synthetic construct
  misc_feature 1..21: note = HBV-targeting guide sequence portion
  source 1..21: mol_type = other RNA
aggtatgtttcccgtctgtcc

SEQ ID NO: 7450 - RNA, 21 nt, synthetic construct
  misc_feature 1..21: note = HBV-targeting guide sequence portion
  source 1..21: mol_type = other RNA
aggtattgtttacacagaaag

SEQ ID NO: 7451 - RNA, 21 nt, synthetic construct
  misc_feature 1..21: note = HBV-targeting guide sequence portion
  source 1..21: mol_type = other RNA
aggtcccctagaagaagaact

SEQ ID NO: 7452 - RNA, 21 nt, synthetic construct
  misc_feature 1..21: note = HBV-targeting guide sequence portion
  source 1..21: mol_type = other RNA
aggtccctagatgcttgatct

SEQ ID NO: 7453 - RNA, 21 nt, synthetic construct
  misc_feature 1..21: note = HBV-targeting guide sequence portion
  source 1..21: mol_type = other RNA
aggtcggtcgttgacattgca

SEQ ID NO: 7454 - RNA, 21 nt, synthetic construct
  misc_feature 1..21: note = HBV-targeting guide sequence portion
  source 1..21: mol_type = other RNA
aggtctgtgccaagtgtttgc

SEQ ID NO: 7455 - RNA, 21 nt, synthetic construct
  misc_feature 1..21: note = HBV-targeting guide sequence portion
  source 1..21: mol_type = other RNA
aggtcttacataagaggactc

SEQ ID NO: 7456 - RNA, 21 nt, synthetic construct
  misc_feature 1..21: note = HBV-targeting guide sequence portion
  source 1..21: mol_type = other RNA
aggtgaaaaagttgcatggtg

SEQ ID NO: 7457 - RNA, 21 nt, synthetic construct
  misc_feature 1..21: note = HBV-targeting guide sequence portion
  source 1..21: mol_type = other RNA
aggtgaacaatgctcaggaga

SEQ ID NO: 7458 - RNA, 21 nt, synthetic construct
  misc_feature 1..21: note = HBV-targeting guide sequence portion
  source 1..21: mol_type = other RNA
aggtgaagcgaagtgcacacg

SEQ ID NO: 7459 - RNA, 21 nt, synthetic construct
  misc_feature 1..21: note = HBV-targeting guide sequence portion
  source 1..21: mol_type = other RNA
aggtgcagtttccatccgaag

SEQ ID NO: 7460 - RNA, 21 nt, synthetic construct
  misc_feature 1..21: note = HBV-targeting guide sequence portion
  source 1..21: mol_type = other RNA
aggtgcgccccgtggtcggtc

SEQ ID NO: 7461 - RNA, 21 nt, synthetic construct
  misc_feature 1..21: note = HBV-targeting guide sequence portion
  source 1..21: mol_type = other RNA
aggtggagacagcggggtagg

SEQ ID NO: 7462 - RNA, 21 nt, synthetic construct
  misc_feature 1..21: note = HBV-targeting guide sequence portion
  source 1..21: mol_type = other RNA
aggtgggaaattttacggggc

SEQ ID NO: 7463 - RNA, 21 nt, synthetic construct
  misc_feature 1..21: note = HBV-targeting guide sequence portion
  source 1..21: mol_type = other RNA
aggttcaggtattgtttacac

SEQ ID NO: 7464 - RNA, 21 nt, synthetic construct
  misc_feature 1..21: note = HBV-targeting guide sequence portion
  source 1..21: mol_type = other RNA
aggttccacgcatgcgctgat

SEQ ID NO: 7465 - RNA, 21 nt, synthetic construct
  misc_feature 1..21: note = HBV-targeting guide sequence portion
  source 1..21: mol_type = other RNA
aggttccttgagcaggagtcg

SEQ ID NO: 7466 - RNA, 21 nt, synthetic construct
  misc_feature 1..21: note = HBV-targeting guide sequence portion
  source 1..21: mol_type = other RNA
aggttctgcagggtcccgtgc

SEQ ID NO: 7467 - RNA, 21 nt, synthetic construct
  misc_feature 1..21: note = HBV-targeting guide sequence portion
  source 1..21: mol_type = other RNA
aggttggggactgcgaatttt

SEQ ID NO: 7468 - RNA, 21 nt, synthetic construct
  misc_feature 1..21: note = HBV-targeting guide sequence portion
  source 1..21: mol_type = other RNA
aggttggtgagtgattggagg

SEQ ID NO: 7469 - RNA, 21 nt, synthetic construct
  misc_feature 1..21: note = HBV-targeting guide sequence portion
  source 1..21: mol_type = other RNA
aggtttaatacccttatccaa

SEQ ID NO: 7470 - RNA, 21 nt, synthetic construct
  misc_feature 1..21: note = HBV-targeting guide sequence portion
  source 1..21: mol_type = other RNA
aggtttgcattatgccctgag

SEQ ID NO: 7471 - RNA, 21 nt, synthetic construct
  misc_feature 1..21: note = HBV-targeting guide sequence portion
  source 1..21: mol_type = other RNA
aggttttatcctaaattcacc

SEQ ID NO: 7472 - RNA, 21 nt, synthetic construct
  misc_feature 1..21: note = HBV-targeting guide sequence portion
  source 1..21: mol_type = other RNA
aggttttgtacagcaacagga

SEQ ID NO: 7473 - RNA, 21 nt, synthetic construct
  misc_feature 1..21: note = HBV-targeting guide sequence portion
  source 1..21: mol_type = other RNA
agtaaaccctgttccgactac

SEQ ID NO: 7474 - RNA, 21 nt, synthetic construct
  misc_feature 1..21: note = HBV-targeting guide sequence portion
  source 1..21: mol_type = other RNA
agtaaactgagccaagagaaa

SEQ ID NO: 7475 - RNA, 21 nt, synthetic construct
  misc_feature 1..21: note = HBV-targeting guide sequence portion
  source 1..21: mol_type = other RNA
agtaactccacagtagctcca

SEQ ID NO: 7476 - RNA, 21 nt, synthetic construct
  misc_feature 1..21: note = HBV-targeting guide sequence portion
  source 1..21: mol_type = other RNA
agtaagacaagaaatgtgaaa

SEQ ID NO: 7477 - RNA, 21 nt, synthetic construct
  misc_feature 1..21: note = HBV-targeting guide sequence portion
  source 1..21: mol_type = other RNA
agtaatgattaactagatgtt

SEQ ID NO: 7478 - RNA, 21 nt, synthetic construct
  misc_feature 1..21: note = HBV-targeting guide sequence portion
  source 1..21: mol_type = other RNA
agtacaaagatcattaatcta

SEQ ID NO: 7479 - RNA, 21 nt, synthetic construct
  misc_feature 1..21: note = HBV-targeting guide sequence portion
  source 1..21: mol_type = other RNA
agtacccacccaggtagctag

SEQ ID NO: 7480 - RNA, 21 nt, synthetic construct
  misc_feature 1..21: note = HBV-targeting guide sequence portion
  source 1..21: mol_type = other RNA
agtagaagaataaagccccgt

SEQ ID NO: 7481 - RNA, 21 nt, synthetic construct
  misc_feature 1..21: note = HBV-targeting guide sequence portion
  source 1..21: mol_type = other RNA
agtagctccaaattctttata

SEQ ID NO: 7482 - RNA, 21 nt, synthetic construct
  misc_feature 1..21: note = HBV-targeting guide sequence portion
  source 1..21: mol_type = other RNA
agtaggacatgaacaagagat

SEQ ID NO: 7483 - RNA, 21 nt, synthetic construct
  misc_feature 1..21: note = HBV-targeting guide sequence portion
  source 1..21: mol_type = other RNA
agtagtcagttatgtcaacac

SEQ ID NO: 7484 - RNA, 21 nt, synthetic construct
  misc_feature 1..21: note = HBV-targeting guide sequence portion
  source 1..21: mol_type = other RNA
agtagtcggaacagggtttac

SEQ ID NO: 7485 - RNA, 21 nt, synthetic construct
  misc_feature 1..21: note = HBV-targeting guide sequence portion
  source 1..21: mol_type = other RNA
agtatcccttggactcataag

SEQ ID NO: 7486 - RNA, 21 nt, synthetic construct
  misc_feature 1..21: note = HBV-targeting guide sequence portion
  source 1..21: mol_type = other RNA
agtatgcctcaaggtcggtcg

SEQ ID NO: 7487 - RNA, 21 nt, synthetic construct
  misc_feature 1..21: note = HBV-targeting guide sequence portion
  source 1..21: mol_type = other RNA
agtatggatcggcagaggagc

SEQ ID NO: 7488 - RNA, 21 nt, synthetic construct
  misc_feature 1..21: note = HBV-targeting guide sequence portion
  source 1..21: mol_type = other RNA
agtatggtgaggtgaacaatg

SEQ ID NO: 7489 - RNA, 21 nt, synthetic construct
  misc_feature 1..21: note = HBV-targeting guide sequence portion
  source 1..21: mol_type = other RNA
agtatttggtgaatttaggat

SEQ ID NO: 7490 - RNA, 21 nt, synthetic construct
  misc_feature 1..21: note = HBV-targeting guide sequence portion
  source 1..21: mol_type = other RNA
agtatttggtgtcttttggag

SEQ ID NO: 7491 - RNA, 21 nt, synthetic construct
  misc_feature 1..21: note = HBV-targeting guide sequence portion
  source 1..21: mol_type = other RNA
agtcagaaggcaaaaacgaga

SEQ ID NO: 7492 - RNA, 21 nt, synthetic construct
  misc_feature 1..21: note = HBV-targeting guide sequence portion
  source 1..21: mol_type = other RNA
agtcaggacggcagcctaccc

SEQ ID NO: 7493 - RNA, 21 nt, synthetic construct
  misc_feature 1..21: note = HBV-targeting guide sequence portion
  source 1..21: mol_type = other RNA
agtcagttatgtcaacactca

SEQ ID NO: 7494 - RNA, 21 nt, synthetic construct
  misc_feature 1..21: note = HBV-targeting guide sequence portion
  source 1..21: mol_type = other RNA
agtcattagttctccccagca

SEQ ID NO: 7495 - RNA, 21 nt, synthetic construct
  misc_feature 1..21: note = HBV-targeting guide sequence portion
  source 1..21: mol_type = other RNA
agtccaagagtcctcttatgt

SEQ ID NO: 7496 - RNA, 21 nt, synthetic construct
  misc_feature 1..21: note = HBV-targeting guide sequence portion
  source 1..21: mol_type = other RNA
agtccaagggatactaacatt

SEQ ID NO: 7497 - RNA, 21 nt, synthetic construct
  misc_feature 1..21: note = HBV-targeting guide sequence portion
  source 1..21: mol_type = other RNA
agtccaccacgagtctagact

SEQ ID NO: 7498 - RNA, 21 nt, synthetic construct
  misc_feature 1..21: note = HBV-targeting guide sequence portion
  source 1..21: mol_type = other RNA
agtccagaagaaccaacaaga

SEQ ID NO: 7499 - RNA, 21 nt, synthetic construct
  misc_feature 1..21: note = HBV-targeting guide sequence portion
  source 1..21: mol_type = other RNA
agtcccaatctggattgttgg

SEQ ID NO: 7500 - RNA, 21 nt, synthetic construct
  misc_feature 1..21: note = HBV-targeting guide sequence portion
  source 1..21: mol_type = other RNA
agtccccaacctccaatcact

SEQ ID NO: 7501 - RNA, 21 nt, synthetic construct
  misc_feature 1..21: note = HBV-targeting guide sequence portion
  source 1..21: mol_type = other RNA
agtcccgagaatgtttgctcc

SEQ ID NO: 7502 - RNA, 21 nt, synthetic construct
  misc_feature 1..21: note = HBV-targeting guide sequence portion
  source 1..21: mol_type = other RNA
agtccctttataccgctgtta

SEQ ID NO: 7503 - RNA, 21 nt, synthetic construct
  misc_feature 1..21: note = HBV-targeting guide sequence portion
  source 1..21: mol_type = other RNA
agtccgcgtaaagagaggtgc

SEQ ID NO: 7504 - RNA, 21 nt, synthetic construct
  misc_feature 1..21: note = HBV-targeting guide sequence portion
  source 1..21: mol_type = other RNA
agtcctcttatgtaagacctt

SEQ ID NO: 7505 - RNA, 21 nt, synthetic construct
  misc_feature 1..21: note = HBV-targeting guide sequence portion
  source 1..21: mol_type = other RNA
agtcggaacagggtttactgt

SEQ ID NO: 7506 - RNA, 21 nt, synthetic construct
  misc_feature 1..21: note = HBV-targeting guide sequence portion
  source 1..21: mol_type = other RNA
agtcgtgcaggttctgcaggg

SEQ ID NO: 7507 - RNA, 21 nt, synthetic construct
  misc_feature 1..21: note = HBV-targeting guide sequence portion
  source 1..21: mol_type = other RNA
agtctagactcgtggtggact

SEQ ID NO: 7508 - RNA, 21 nt, synthetic construct
  misc_feature 1..21: note = HBV-targeting guide sequence portion
  source 1..21: mol_type = other RNA
agtctagactctgcggtattg

SEQ ID NO: 7509 - RNA, 21 nt, synthetic construct
  misc_feature 1..21: note = HBV-targeting guide sequence portion
  source 1..21: mol_type = other RNA
agtctccggaagtgttgatag

SEQ ID NO: 7510 - RNA, 21 nt, synthetic construct
  misc_feature 1..21: note = HBV-targeting guide sequence portion
  source 1..21: mol_type = other RNA
agtctcctgagcattgttcac

SEQ ID NO: 7511 - RNA, 21 nt, synthetic construct
  misc_feature 1..21: note = HBV-targeting guide sequence portion
  source 1..21: mol_type = other RNA
agtctgtacagcatcttgagt

SEQ ID NO: 7512 - RNA, 21 nt, synthetic construct
  misc_feature 1..21: note = HBV-targeting guide sequence portion
  source 1..21: mol_type = other RNA
agtctttaaacaaacagtctt

SEQ ID NO: 7513 - RNA, 21 nt, synthetic construct
  misc_feature 1..21: note = HBV-targeting guide sequence portion
  source 1..21: mol_type = other RNA
agtctttgaagtatgcctcaa

SEQ ID NO: 7514 - RNA, 21 nt, synthetic construct
  misc_feature 1..21: note = HBV-targeting guide sequence portion
  source 1..21: mol_type = other RNA
agtgaaagcctgcttagattg

SEQ ID NO: 7515 - RNA, 21 nt, synthetic construct
  misc_feature 1..21: note = HBV-targeting guide sequence portion
  source 1..21: mol_type = other RNA
agtgagaggcctgtatctccc

SEQ ID NO: 7516 - RNA, 21 nt, synthetic construct
  misc_feature 1..21: note = HBV-targeting guide sequence portion
  source 1..21: mol_type = other RNA
agtgattggaggttggggact

SEQ ID NO: 7517 - RNA, 21 nt, synthetic construct
  misc_feature 1..21: note = HBV-targeting guide sequence portion
  source 1..21: mol_type = other RNA
agtgcacacggtccggcagat

SEQ ID NO: 7518 - RNA, 21 nt, synthetic construct
  misc_feature 1..21: note = HBV-targeting guide sequence portion
  source 1..21: mol_type = other RNA
agtgcagtatggtgaggtgaa

SEQ ID NO: 7519 - RNA, 21 nt, synthetic construct
  misc_feature 1..21: note = HBV-targeting guide sequence portion
  source 1..21: mol_type = other RNA
agtgccatttgttcagtggtt

SEQ ID NO: 7520 - RNA, 21 nt, synthetic construct
  misc_feature 1..21: note = HBV-targeting guide sequence portion
  source 1..21: mol_type = other RNA
agtgcgaatccacactccaaa

SEQ ID NO: 7521 - RNA, 21 nt, synthetic construct
  misc_feature 1..21: note = HBV-targeting guide sequence portion
  source 1..21: mol_type = other RNA
agtgggcctcagcccgtttct

SEQ ID NO: 7522 - RNA, 21 nt, synthetic construct
  misc_feature 1..21: note = HBV-targeting guide sequence portion
  source 1..21: mol_type = other RNA
agtgggggaaagccctacgaa

SEQ ID NO: 7523 - RNA, 21 nt, synthetic construct
  misc_feature 1..21: note = HBV-targeting guide sequence portion
  source 1..21: mol_type = other RNA
agtgggggttgcatcagcaaa

SEQ ID NO: 7524 - RNA, 21 nt, synthetic construct
  misc_feature 1..21: note = HBV-targeting guide sequence portion
  source 1..21: mol_type = other RNA
agtggttcgtagggctttccc

SEQ ID NO: 7525 - RNA, 21 nt, synthetic construct
  misc_feature 1..21: note = HBV-targeting guide sequence portion
  source 1..21: mol_type = other RNA
agtgtcaacacatagcgcctc

SEQ ID NO: 7526 - RNA, 21 nt, synthetic construct
  misc_feature 1..21: note = HBV-targeting guide sequence portion
  source 1..21: mol_type = other RNA
agtgtctagtttggaagtaat

SEQ ID NO: 7527 - RNA, 21 nt, synthetic construct
  misc_feature 1..21: note = HBV-targeting guide sequence portion
  source 1..21: mol_type = other RNA
agtgtggattcgcactcctcc

SEQ ID NO: 7528 - RNA, 21 nt, synthetic construct
  misc_feature 1..21: note = HBV-targeting guide sequence portion
  source 1..21: mol_type = other RNA
agtgtgtaaatagtgtctagt

SEQ ID NO: 7529 - RNA, 21 nt, synthetic construct
  misc_feature 1..21: note = HBV-targeting guide sequence portion
  source 1..21: mol_type = other RNA
agtgtgtcaacgaattgtggg

SEQ ID NO: 7530 - RNA, 21 nt, synthetic construct
  misc_feature 1..21: note = HBV-targeting guide sequence portion
  source 1..21: mol_type = other RNA
agtgttgacataactgactac

SEQ ID NO: 7531 - RNA, 21 nt, synthetic construct
  misc_feature 1..21: note = HBV-targeting guide sequence portion
  source 1..21: mol_type = other RNA
agtgttgataggataggggca

SEQ ID NO: 7532 - RNA, 21 nt, synthetic construct
  misc_feature 1..21: note = HBV-targeting guide sequence portion
  source 1..21: mol_type = other RNA
agtgtttctcagaggtggaga

SEQ ID NO: 7533 - RNA, 21 nt, synthetic construct
  misc_feature 1..21: note = HBV-targeting guide sequence portion
  source 1..21: mol_type = other RNA
agtgtttgctgatgcaacccc

SEQ ID NO: 7534 - RNA, 21 nt, synthetic construct
  misc_feature 1..21: note = HBV-targeting guide sequence portion
  source 1..21: mol_type = other RNA
agttaatcattacttccaaac

SEQ ID NO: 7535 - RNA, 21 nt, synthetic construct
  misc_feature 1..21: note = HBV-targeting guide sequence portion
  source 1..21: mol_type = other RNA
agttaatgagaaaagacggtt

SEQ ID NO: 7536 - RNA, 21 nt, synthetic construct
  misc_feature 1..21: note = HBV-targeting guide sequence portion
  source 1..21: mol_type = other RNA
agttactctcgtttttgcctt

SEQ ID NO: 7537 - RNA, 21 nt, synthetic construct
  misc_feature 1..21: note = HBV-targeting guide sequence portion
  source 1..21: mol_type = other RNA
agttatatggatgatgtggta

SEQ ID NO: 7538 - RNA, 21 nt, synthetic construct
  misc_feature 1..21: note = HBV-targeting guide sequence portion
  source 1..21: mol_type = other RNA
agttatgtcaacactcatatg

SEQ ID NO: 7539 - RNA, 21 nt, synthetic construct
  misc_feature 1..21: note = HBV-targeting guide sequence portion
  source 1..21: mol_type = other RNA
agttcagacaactattgtggt

SEQ ID NO: 7540 - RNA, 21 nt, synthetic construct
  misc_feature 1..21: note = HBV-targeting guide sequence portion
  source 1..21: mol_type = other RNA
agttcaggaacagtaaaccct

SEQ ID NO: 7541 - RNA, 21 nt, synthetic construct
  misc_feature 1..21: note = HBV-targeting guide sequence portion
  source 1..21: mol_type = other RNA
agttccccctagaaaattgag

SEQ ID NO: 7542 - RNA, 21 nt, synthetic construct
  misc_feature 1..21: note = HBV-targeting guide sequence portion
  source 1..21: mol_type = other RNA
agttccgcagtatggatcggc

SEQ ID NO: 7543 - RNA, 21 nt, synthetic construct
  misc_feature 1..21: note = HBV-targeting guide sequence portion
  source 1..21: mol_type = other RNA
agttctccccagcaaagaatt

SEQ ID NO: 7544 - RNA, 21 nt, synthetic construct
  misc_feature 1..21: note = HBV-targeting guide sequence portion
  source 1..21: mol_type = other RNA
agttcttcttctaggggacct

SEQ ID NO: 7545 - RNA, 21 nt, synthetic construct
  misc_feature 1..21: note = HBV-targeting guide sequence portion
  source 1..21: mol_type = other RNA
agttgcatggtgctggtgcgc

SEQ ID NO: 7546 - RNA, 21 nt, synthetic construct
  misc_feature 1..21: note = HBV-targeting guide sequence portion
  source 1..21: mol_type = other RNA
agttggacccagccttcagag

SEQ ID NO: 7547 - RNA, 21 nt, synthetic construct
  misc_feature 1..21: note = HBV-targeting guide sequence portion
  source 1..21: mol_type = other RNA
agttggaggacaggaggttgg

SEQ ID NO: 7548 - RNA, 21 nt, synthetic construct
  misc_feature 1..21: note = HBV-targeting guide sequence portion
  source 1..21: mol_type = other RNA
agttggcagcacagcctagca

SEQ ID NO: 7549 - RNA, 21 nt, synthetic construct
  misc_feature 1..21: note = HBV-targeting guide sequence portion
  source 1..21: mol_type = other RNA
agttggcgaaaaagtgaaagc

SEQ ID NO: 7550 - RNA, 21 nt, synthetic construct
  misc_feature 1..21: note = HBV-targeting guide sequence portion
  source 1..21: mol_type = other RNA
agttgggggaggagattagat

SEQ ID NO: 7551 - RNA, 21 nt, synthetic construct
  misc_feature 1..21: note = HBV-targeting guide sequence portion
  source 1..21: mol_type = other RNA
agttgtcagtcccgagaatgt

SEQ ID NO: 7552 - RNA, 21 nt, synthetic construct
  misc_feature 1..21: note = HBV-targeting guide sequence portion
  source 1..21: mol_type = other RNA
agttgtctgaactttaggccc

SEQ ID NO: 7553 - RNA, 21 nt, synthetic construct
  misc_feature 1..21: note = HBV-targeting guide sequence portion
  source 1..21: mol_type = other RNA
agtttactagtgccatttgtt

SEQ ID NO: 7554 - RNA, 21 nt, synthetic construct
  misc_feature 1..21: note = HBV-targeting guide sequence portion
  source 1..21: mol_type = other RNA
agtttccatccgaaggttttg

SEQ ID NO: 7555 - RNA, 21 nt, synthetic construct
  misc_feature 1..21: note = HBV-targeting guide sequence portion
  source 1..21: mol_type = other RNA
agtttgctctgaaggctgggt

SEQ ID NO: 7556 - RNA, 21 nt, synthetic construct
  misc_feature 1..21: note = HBV-targeting guide sequence portion
  source 1..21: mol_type = other RNA
agtttggaagtaatgattaac

SEQ ID NO: 7557 - RNA, 21 nt, synthetic construct
  misc_feature 1..21: note = HBV-targeting guide sequence portion
  source 1..21: mol_type = other RNA
agtttgtaggcccgcttacag

SEQ ID NO: 7558 - RNA, 21 nt, synthetic construct
  misc_feature 1..21: note = HBV-targeting guide sequence portion
  source 1..21: mol_type = other RNA
agttttctgaaacattctttg

SEQ ID NO: 7559 - RNA, 21 nt, synthetic construct
  misc_feature 1..21: note = HBV-targeting guide sequence portion
  source 1..21: mol_type = other RNA
ataaaacacccgccttccata

SEQ ID NO: 7560 - RNA, 21 nt, synthetic construct
  misc_feature 1..21: note = HBV-targeting guide sequence portion
  source 1..21: mol_type = other RNA
ataaaacctagcaggcataat

SEQ ID NO: 7561 - RNA, 21 nt, synthetic construct
  misc_feature 1..21: note = HBV-targeting guide sequence portion
  source 1..21: mol_type = other RNA
ataaaacgccgcagacacatc

SEQ ID NO: 7562 - RNA, 21 nt, synthetic construct
  misc_feature 1..21: note = HBV-targeting guide sequence portion
  source 1..21: mol_type = other RNA
ataaagaatttggagctactg

SEQ ID NO: 7563 - RNA, 21 nt, synthetic construct
  misc_feature 1..21: note = HBV-targeting guide sequence portion
  source 1..21: mol_type = other RNA
ataaagccccgtaaaatttcc

SEQ ID NO: 7564 - RNA, 21 nt, synthetic construct
  misc_feature 1..21: note = HBV-targeting guide sequence portion
  source 1..21: mol_type = other RNA
ataaagggactcaagatgctg

SEQ ID NO: 7565 - RNA, 21 nt, synthetic construct
  misc_feature 1..21: note = HBV-targeting guide sequence portion
  source 1..21: mol_type = other RNA
ataaattggtctgcgcaccag

SEQ ID NO: 7566 - RNA, 21 nt, synthetic construct
  misc_feature 1..21: note = HBV-targeting guide sequence portion
  source 1..21: mol_type = other RNA
ataaccacattgtgtaaaagg

SEQ ID NO: 7567 - RNA, 21 nt, synthetic construct
  misc_feature 1..21: note = HBV-targeting guide sequence portion
  source 1..21: mol_type = other RNA
ataaccaggacaagttggagg

SEQ ID NO: 7568 - RNA, 21 nt, synthetic construct
  misc_feature 1..21: note = HBV-targeting guide sequence portion
  source 1..21: mol_type = other RNA
ataaccccatctctttgtttt

SEQ ID NO: 7569 - RNA, 21 nt, synthetic construct
  misc_feature 1..21: note = HBV-targeting guide sequence portion
  source 1..21: mol_type = other RNA
ataactgaaagccaaacagtg

SEQ ID NO: 7570 - RNA, 21 nt, synthetic construct
  misc_feature 1..21: note = HBV-targeting guide sequence portion
  source 1..21: mol_type = other RNA
ataactgactactaggtccct

SEQ ID NO: 7571 - RNA, 21 nt, synthetic construct
  misc_feature 1..21: note = HBV-targeting guide sequence portion
  source 1..21: mol_type = other RNA
ataagagagtgtcaacacata

SEQ ID NO: 7572 - RNA, 21 nt, synthetic construct
  misc_feature 1..21: note = HBV-targeting guide sequence portion
  source 1..21: mol_type = other RNA
ataagaggactcttggactct

SEQ ID NO: 7573 - RNA, 21 nt, synthetic construct
  misc_feature 1..21: note = HBV-targeting guide sequence portion
  source 1..21: mol_type = other RNA
ataagctggaggagtgcgaat

SEQ ID NO: 7574 - RNA, 21 nt, synthetic construct
  misc_feature 1..21: note = HBV-targeting guide sequence portion
  source 1..21: mol_type = other RNA
ataagggtattaaaccttatt

SEQ ID NO: 7575 - RNA, 21 nt, synthetic construct
  misc_feature 1..21: note = HBV-targeting guide sequence portion
  source 1..21: mol_type = other RNA
ataaggtgggaaattttacgg

SEQ ID NO: 7576 - RNA, 21 nt, synthetic construct
  misc_feature 1..21: note = HBV-targeting guide sequence portion
  source 1..21: mol_type = other RNA
ataaggtttaatacccttatc

SEQ ID NO: 7577 - RNA, 21 nt, synthetic construct
  misc_feature 1..21: note = HBV-targeting guide sequence portion
  source 1..21: mol_type = other RNA
ataataaggtttaataccctt

SEQ ID NO: 7578 - RNA, 21 nt, synthetic construct
  misc_feature 1..21: note = HBV-targeting guide sequence portion
  source 1..21: mol_type = other RNA
ataatatcttggtgtagatgt

SEQ ID NO: 7579 - RNA, 21 nt, synthetic construct
  misc_feature 1..21: note = HBV-targeting guide sequence portion
  source 1..21: mol_type = other RNA
ataatcaatttcaaccgtctt

SEQ ID NO: 7580 - RNA, 21 nt, synthetic construct
  misc_feature 1..21: note = HBV-targeting guide sequence portion
  source 1..21: mol_type = other RNA
ataatgcaaaccttgccagca

SEQ ID NO: 7581 - RNA, 21 nt, synthetic construct
  misc_feature 1..21: note = HBV-targeting guide sequence portion
  source 1..21: mol_type = other RNA
atacaagggcattaaagcagg

SEQ ID NO: 7582 - RNA, 21 nt, synthetic construct
  misc_feature 1..21: note = HBV-targeting guide sequence portion
  source 1..21: mol_type = other RNA
atacacaaaatcaaagaatgt

SEQ ID NO: 7583 - RNA, 21 nt, synthetic construct
  misc_feature 1..21: note = HBV-targeting guide sequence portion
  source 1..21: mol_type = other RNA
atacagagctgcggcggtatc

SEQ ID NO: 7584 - RNA, 21 nt, synthetic construct
  misc_feature 1..21: note = HBV-targeting guide sequence portion
  source 1..21: mol_type = other RNA
atacaggcctctcactctggg

SEQ ID NO: 7585 - RNA, 21 nt, synthetic construct
  misc_feature 1..21: note = HBV-targeting guide sequence portion
  source 1..21: mol_type = other RNA
atacaggtgcagtttccatcc

SEQ ID NO: 7586 - RNA, 21 nt, synthetic construct
  misc_feature 1..21: note = HBV-targeting guide sequence portion
  source 1..21: mol_type = other RNA
atacatagaggttccttgagc

SEQ ID NO: 7587 - RNA, 21 nt, synthetic construct
  misc_feature 1..21: note = HBV-targeting guide sequence portion
  source 1..21: mol_type = other RNA
atacatcgttcccatggctgc

SEQ ID NO: 7588 - RNA, 21 nt, synthetic construct
  misc_feature 1..21: note = HBV-targeting guide sequence portion
  source 1..21: mol_type = other RNA
atacatctacaccaagatatt

SEQ ID NO: 7589 - RNA, 21 nt, synthetic construct
  misc_feature 1..21: note = HBV-targeting guide sequence portion
  source 1..21: mol_type = other RNA
atacatgcatacaagggcatt

SEQ ID NO: 7590 - RNA, 21 nt, synthetic construct
  misc_feature 1..21: note = HBV-targeting guide sequence portion
  source 1..21: mol_type = other RNA
ataccacatcatccatataac

SEQ ID NO: 7591 - RNA, 21 nt, synthetic construct
  misc_feature 1..21: note = HBV-targeting guide sequence portion
  source 1..21: mol_type = other RNA
atacccttatccaagggcaag

SEQ ID NO: 7592 - RNA, 21 nt, synthetic construct
  misc_feature 1..21: note = HBV-targeting guide sequence portion
  source 1..21: mol_type = other RNA
ataccgcagagtctagactcg

SEQ ID NO: 7593 - RNA, 21 nt, synthetic construct
  misc_feature 1..21: note = HBV-targeting guide sequence portion
  source 1..21: mol_type = other RNA
ataccgccgcagctctgtatc

SEQ ID NO: 7594 - RNA, 21 nt, synthetic construct
  misc_feature 1..21: note = HBV-targeting guide sequence portion
  source 1..21: mol_type = other RNA
ataccgctgttaccaattttc

SEQ ID NO: 7595 - RNA, 21 nt, synthetic construct
  misc_feature 1..21: note = HBV-targeting guide sequence portion
  source 1..21: mol_type = other RNA
atacctgaacctttaccccgt

SEQ ID NO: 7596 - RNA, 21 nt, synthetic construct
  misc_feature 1..21: note = HBV-targeting guide sequence portion
  source 1..21: mol_type = other RNA
ataccttgatagtccagaaga

SEQ ID NO: 7597 - RNA, 21 nt, synthetic construct
  misc_feature 1..21: note = HBV-targeting guide sequence portion
  source 1..21: mol_type = other RNA
atactaacattgagatccccg

SEQ ID NO: 7598 - RNA, 21 nt, synthetic construct
  misc_feature 1..21: note = HBV-targeting guide sequence portion
  source 1..21: mol_type = other RNA
atactctaggaccgtttctct

SEQ ID NO: 7599 - RNA, 21 nt, synthetic construct
  misc_feature 1..21: note = HBV-targeting guide sequence portion
  source 1..21: mol_type = other RNA
atactgcactcaggcaagcaa

SEQ ID NO: 7600 - RNA, 21 nt, synthetic construct
  misc_feature 1..21: note = HBV-targeting guide sequence portion
  source 1..21: mol_type = other RNA
atactgcggaactcctagccg

SEQ ID NO: 7601 - RNA, 21 nt, synthetic construct
  misc_feature 1..21: note = HBV-targeting guide sequence portion
  source 1..21: mol_type = other RNA
atacttcaaagactgtttgtt

SEQ ID NO: 7602 - RNA, 21 nt, synthetic construct
  misc_feature 1..21: note = HBV-targeting guide sequence portion
  source 1..21: mol_type = other RNA
atacttgcccttggataaggg

SEQ ID NO: 7603 - RNA, 21 nt, synthetic construct
  misc_feature 1..21: note = HBV-targeting guide sequence portion
  source 1..21: mol_type = other RNA
atagaccaccaaatgccccta

SEQ ID NO: 7604 - RNA, 21 nt, synthetic construct
  misc_feature 1..21: note = HBV-targeting guide sequence portion
  source 1..21: mol_type = other RNA
atagaggttccttgagcagga

SEQ ID NO: 7605 - RNA, 21 nt, synthetic construct
  misc_feature 1..21: note = HBV-targeting guide sequence portion
  source 1..21: mol_type = other RNA
atagagtgtgtaaatagtgtc

SEQ ID NO: 7606 - RNA, 21 nt, synthetic construct
  misc_feature 1..21: note = HBV-targeting guide sequence portion
  source 1..21: mol_type = other RNA
atagcagcaggatgaagagga

SEQ ID NO: 7607 - RNA, 21 nt, synthetic construct
  misc_feature 1..21: note = HBV-targeting guide sequence portion
  source 1..21: mol_type = other RNA
atagcccatgaaattaagaga

SEQ ID NO: 7608 - RNA, 21 nt, synthetic construct
  misc_feature 1..21: note = HBV-targeting guide sequence portion
  source 1..21: mol_type = other RNA
atagcgcctcattctgtgggt

SEQ ID NO: 7609 - RNA, 21 nt, synthetic construct
  misc_feature 1..21: note = HBV-targeting guide sequence portion
  source 1..21: mol_type = other RNA
ataggaattttccgaaagccc

SEQ ID NO: 7610 - RNA, 21 nt, synthetic construct
  misc_feature 1..21: note = HBV-targeting guide sequence portion
  source 1..21: mol_type = other RNA
ataggataggggcatttggtg

SEQ ID NO: 7611 - RNA, 21 nt, synthetic construct
  misc_feature 1..21: note = HBV-targeting guide sequence portion
  source 1..21: mol_type = other RNA
ataggccatcagcgcatgcgt

SEQ ID NO: 7612 - RNA, 21 nt, synthetic construct
  misc_feature 1..21: note = HBV-targeting guide sequence portion
  source 1..21: mol_type = other RNA
ataggcctgttaaccgggagt

SEQ ID NO: 7613 - RNA, 21 nt, synthetic construct
  misc_feature 1..21: note = HBV-targeting guide sequence portion
  source 1..21: mol_type = other RNA
ataggggcatttggtggtcta

SEQ ID NO: 7614 - RNA, 21 nt, synthetic construct
  misc_feature 1..21: note = HBV-targeting guide sequence portion
  source 1..21: mol_type = other RNA
atagtccagaagaaccaacaa

SEQ ID NO: 7615 - RNA, 21 nt, synthetic construct
  misc_feature 1..21: note = HBV-targeting guide sequence portion
  source 1..21: mol_type = other RNA
atagtgtctagtttggaagta

SEQ ID NO: 7616 - RNA, 21 nt, synthetic construct
  misc_feature 1..21: note = HBV-targeting guide sequence portion
  source 1..21: mol_type = other RNA
atagttgtctgaactttaggc

SEQ ID NO: 7617 - RNA, 21 nt, synthetic construct
  misc_feature 1..21: note = HBV-targeting guide sequence portion
  source 1..21: mol_type = other RNA
atataaaacacccgccttcca

SEQ ID NO: 7618 - RNA, 21 nt, synthetic construct
  misc_feature 1..21: note = HBV-targeting guide sequence portion
  source 1..21: mol_type = other RNA
atataaagaatttggagctac

SEQ ID NO: 7619 - RNA, 21 nt, synthetic construct
  misc_feature 1..21: note = HBV-targeting guide sequence portion
  source 1..21: mol_type = other RNA
atataactgaaagccaaacag

SEQ ID NO: 7620 - RNA, 21 nt, synthetic construct
  misc_feature 1..21: note = HBV-targeting guide sequence portion
  source 1..21: mol_type = other RNA
atataagagagtgtcaacaca

SEQ ID NO: 7621 - RNA, 21 nt, synthetic construct
  misc_feature 1..21: note = HBV-targeting guide sequence portion
  source 1..21: mol_type = other RNA
atatacatcgttcccatggct

SEQ ID NO: 7622 - RNA, 21 nt, synthetic construct
  misc_feature 1..21: note = HBV-targeting guide sequence portion
  source 1..21: mol_type = other RNA
atatacatctacaccaagata

SEQ ID NO: 7623 - RNA, 21 nt, synthetic construct
  misc_feature 1..21: note = HBV-targeting guide sequence portion
  source 1..21: mol_type = other RNA
atatcgtcaatcttctcgagg

SEQ ID NO: 7624 - RNA, 21 nt, synthetic construct
  misc_feature 1..21: note = HBV-targeting guide sequence portion
  source 1..21: mol_type = other RNA
atatcttggtgtagatgtata

SEQ ID NO: 7625 - RNA, 21 nt, synthetic construct
  misc_feature 1..21: note = HBV-targeting guide sequence portion
  source 1..21: mol_type = other RNA
atatgagtgttgacataactg

SEQ ID NO: 7626 - RNA, 21 nt, synthetic construct
  misc_feature 1..21: note = HBV-targeting guide sequence portion
  source 1..21: mol_type = other RNA
atatggatgatgtggtattgg

SEQ ID NO: 7627 - RNA, 21 nt, synthetic construct
  misc_feature 1..21: note = HBV-targeting guide sequence portion
  source 1..21: mol_type = other RNA
atatgggcctaaagttcagac

SEQ ID NO: 7628 - RNA, 21 nt, synthetic construct
  misc_feature 1..21: note = HBV-targeting guide sequence portion
  source 1..21: mol_type = other RNA
atatgggtcaatgtccatgcc

SEQ ID NO: 7629 - RNA, 21 nt, synthetic construct
  misc_feature 1..21: note = HBV-targeting guide sequence portion
  source 1..21: mol_type = other RNA
atatggtgacccacagaatga

SEQ ID NO: 7630 - RNA, 21 nt, synthetic construct
  misc_feature 1..21: note = HBV-targeting guide sequence portion
  source 1..21: mol_type = other RNA
atatgtgagaggcagtagtcg

SEQ ID NO: 7631 - RNA, 21 nt, synthetic construct
  misc_feature 1..21: note = HBV-targeting guide sequence portion
  source 1..21: mol_type = other RNA
atattaggaaaagagggtgtt

SEQ ID NO: 7632 - RNA, 21 nt, synthetic construct
  misc_feature 1..21: note = HBV-targeting guide sequence portion
  source 1..21: mol_type = other RNA
atattatcaaaaaatgtgaac

SEQ ID NO: 7633 - RNA, 21 nt, synthetic construct
  misc_feature 1..21: note = HBV-targeting guide sequence portion
  source 1..21: mol_type = other RNA
atattcttgggaacaagagct

SEQ ID NO: 7634 - RNA, 21 nt, synthetic construct
  misc_feature 1..21: note = HBV-targeting guide sequence portion
  source 1..21: mol_type = other RNA
atatttgcgggagaggacaac

SEQ ID NO: 7635 - RNA, 21 nt, synthetic construct
  misc_feature 1..21: note = HBV-targeting guide sequence portion
  source 1..21: mol_type = other RNA
atcaaaaaatgtgaacagttt

SEQ ID NO: 7636 - RNA, 21 nt, synthetic construct
  misc_feature 1..21: note = HBV-targeting guide sequence portion
  source 1..21: mol_type = other RNA
atcaaagaatgtttcagaaaa

SEQ ID NO: 7637 - RNA, 21 nt, synthetic construct
  misc_feature 1..21: note = HBV-targeting guide sequence portion
  source 1..21: mol_type = other RNA
atcaacacttccggagacttg

SEQ ID NO: 7638 - RNA, 21 nt, synthetic construct
  misc_feature 1..21: note = HBV-targeting guide sequence portion
  source 1..21: mol_type = other RNA
atcaaccaccagcacgggacc

SEQ ID NO: 7639 - RNA, 21 nt, synthetic construct
  misc_feature 1..21: note = HBV-targeting guide sequence portion
  source 1..21: mol_type = other RNA
atcaagcatctagggacctag

SEQ ID NO: 7640 - RNA, 21 nt, synthetic construct
  misc_feature 1..21: note = HBV-targeting guide sequence portion
  source 1..21: mol_type = other RNA
atcaaggtatgtttcccgtct

SEQ ID NO: 7641 - RNA, 21 nt, synthetic construct
  misc_feature 1..21: note = HBV-targeting guide sequence portion
  source 1..21: mol_type = other RNA
atcaataggcctgttaaccgg

SEQ ID NO: 7642 - RNA, 21 nt, synthetic construct
  misc_feature 1..21: note = HBV-targeting guide sequence portion
  source 1..21: mol_type = other RNA
atcaatgacatagcccatgaa

SEQ ID NO: 7643 - RNA, 21 nt, synthetic construct
  misc_feature 1..21: note = HBV-targeting guide sequence portion
  source 1..21: mol_type = other RNA
atcaatttcaaccgtcttttc

SEQ ID NO: 7644 - RNA, 21 nt, synthetic construct
  misc_feature 1..21: note = HBV-targeting guide sequence portion
  source 1..21: mol_type = other RNA
atcacatcaggattcctagga

SEQ ID NO: 7645 - RNA, 21 nt, synthetic construct
  misc_feature 1..21: note = HBV-targeting guide sequence portion
  source 1..21: mol_type = other RNA
atcacatcatacacaaaatca

SEQ ID NO: 7646 - RNA, 21 nt, synthetic construct
  misc_feature 1..21: note = HBV-targeting guide sequence portion
  source 1..21: mol_type = other RNA
atcactcaccaacctcctgtc

SEQ ID NO: 7647 - RNA, 21 nt, synthetic construct
  misc_feature 1..21: note = HBV-targeting guide sequence portion
  source 1..21: mol_type = other RNA
atcagcaaacacttggcacag

SEQ ID NO: 7648 - RNA, 21 nt, synthetic construct
  misc_feature 1..21: note = HBV-targeting guide sequence portion
  source 1..21: mol_type = other RNA
atcagcgcatgcgtggaacct

SEQ ID NO: 7649 - RNA, 21 nt, synthetic construct
  misc_feature 1..21: note = HBV-targeting guide sequence portion
  source 1..21: mol_type = other RNA
atcaggattcctaggacccct

SEQ ID NO: 7650 - RNA, 21 nt, synthetic construct
  misc_feature 1..21: note = HBV-targeting guide sequence portion
  source 1..21: mol_type = other RNA
atcatacacaaaatcaaagaa

SEQ ID NO: 7651 - RNA, 21 nt, synthetic construct
  misc_feature 1..21: note = HBV-targeting guide sequence portion
  source 1..21: mol_type = other RNA
atcatcaaccaccagcacggg

SEQ ID NO: 7652 - RNA, 21 nt, synthetic construct
  misc_feature 1..21: note = HBV-targeting guide sequence portion
  source 1..21: mol_type = other RNA
atcatccatataactgaaagc

SEQ ID NO: 7653 - RNA, 21 nt, synthetic construct
  misc_feature 1..21: note = HBV-targeting guide sequence portion
  source 1..21: mol_type = other RNA
atcatcctgggctttcggaaa

SEQ ID NO: 7654 - RNA, 21 nt, synthetic construct
  misc_feature 1..21: note = HBV-targeting guide sequence portion
  source 1..21: mol_type = other RNA
atcatctcttgttcatgtcct

SEQ ID NO: 7655 - RNA, 21 nt, synthetic construct
  misc_feature 1..21: note = HBV-targeting guide sequence portion
  source 1..21: mol_type = other RNA
atcatcttcctcttcatcctg

SEQ ID NO: 7656 - RNA, 21 nt, synthetic construct
  misc_feature 1..21: note = HBV-targeting guide sequence portion
  source 1..21: mol_type = other RNA
atcattaatctaatctcctcc

SEQ ID NO: 7657 - RNA, 21 nt, synthetic construct
  misc_feature 1..21: note = HBV-targeting guide sequence portion
  source 1..21: mol_type = other RNA
atcattacttccaaactagac

SEQ ID NO: 7658 - RNA, 21 nt, synthetic construct
  misc_feature 1..21: note = HBV-targeting guide sequence portion
  source 1..21: mol_type = other RNA
atcattgccacaaaatcacat

SEQ ID NO: 7659 - RNA, 21 nt, synthetic construct
  misc_feature 1..21: note = HBV-targeting guide sequence portion
  source 1..21: mol_type = other RNA
atccaagggcaagtatttggt

SEQ ID NO: 7660 - RNA, 21 nt, synthetic construct
  misc_feature 1..21: note = HBV-targeting guide sequence portion
  source 1..21: mol_type = other RNA
atccacactccaaaagacacc

SEQ ID NO: 7661 - RNA, 21 nt, synthetic construct
  misc_feature 1..21: note = HBV-targeting guide sequence portion
  source 1..21: mol_type = other RNA
atccagaacatctagttaatc

SEQ ID NO: 7662 - RNA, 21 nt, synthetic construct
  misc_feature 1..21: note = HBV-targeting guide sequence portion
  source 1..21: mol_type = other RNA
atccagattgggacttcaatc

SEQ ID NO: 7663 - RNA, 21 nt, synthetic construct
  misc_feature 1..21: note = HBV-targeting guide sequence portion
  source 1..21: mol_type = other RNA
atccagcgataaccaggacaa

SEQ ID NO: 7664 - RNA, 21 nt, synthetic construct
  misc_feature 1..21: note = HBV-targeting guide sequence portion
  source 1..21: mol_type = other RNA
atccagttggcagcacagcct

SEQ ID NO: 7665 - RNA, 21 nt, synthetic construct
  misc_feature 1..21: note = HBV-targeting guide sequence portion
  source 1..21: mol_type = other RNA
atccatactgcggaactccta

SEQ ID NO: 7666 - RNA, 21 nt, synthetic construct
  misc_feature 1..21: note = HBV-targeting guide sequence portion
  source 1..21: mol_type = other RNA
atccatataactgaaagccaa

SEQ ID NO: 7667 - RNA, 21 nt, synthetic construct
  misc_feature 1..21: note = HBV-targeting guide sequence portion
  source 1..21: mol_type = other RNA
atcccaacaaggatccctggc

SEQ ID NO: 7668 - RNA, 21 nt, synthetic construct
  misc_feature 1..21: note = HBV-targeting guide sequence portion
  source 1..21: mol_type = other RNA
atcccagaggattgctggtgg

SEQ ID NO: 7669 - RNA, 21 nt, synthetic construct
  misc_feature 1..21: note = HBV-targeting guide sequence portion
  source 1..21: mol_type = other RNA
atcccagagtgagaggcctgt

SEQ ID NO: 7670 - RNA, 21 nt, synthetic construct
  misc_feature 1..21: note = HBV-targeting guide sequence portion
  source 1..21: mol_type = other RNA
atcccatcatcctgggctttc

SEQ ID NO: 7671 - RNA, 21 nt, synthetic construct
  misc_feature 1..21: note = HBV-targeting guide sequence portion
  source 1..21: mol_type = other RNA
atccccaacaatcaatgacat

SEQ ID NO: 7672 - RNA, 21 nt, synthetic construct
  misc_feature 1..21: note = HBV-targeting guide sequence portion
  source 1..21: mol_type = other RNA
atccccgagattgagatcttc

SEQ ID NO: 7673 - RNA, 21 nt, synthetic construct
  misc_feature 1..21: note = HBV-targeting guide sequence portion
  source 1..21: mol_type = other RNA
atcccgatacagagctgcggc

SEQ ID NO: 7674 - RNA, 21 nt, synthetic construct
  misc_feature 1..21: note = HBV-targeting guide sequence portion
  source 1..21: mol_type = other RNA
atcccgcggacgacccatctc

SEQ ID NO: 7675 - RNA, 21 nt, synthetic construct
  misc_feature 1..21: note = HBV-targeting guide sequence portion
  source 1..21: mol_type = other RNA
atccctcctgttgctgtacaa

SEQ ID NO: 7676 - RNA, 21 nt, synthetic construct
  misc_feature 1..21: note = HBV-targeting guide sequence portion
  source 1..21: mol_type = other RNA
atccctggccagacgccaaca

SEQ ID NO: 7677 - RNA, 21 nt, synthetic construct
  misc_feature 1..21: note = HBV-targeting guide sequence portion
  source 1..21: mol_type = other RNA
atcccttggactcataaggtg

SEQ ID NO: 7678 - RNA, 21 nt, synthetic construct
  misc_feature 1..21: note = HBV-targeting guide sequence portion
  source 1..21: mol_type = other RNA
atccgaaggttttgtacagca

SEQ ID NO: 7679 - RNA, 21 nt, synthetic construct
  misc_feature 1..21: note = HBV-targeting guide sequence portion
  source 1..21: mol_type = other RNA
atccgcctcctgcctctacca

SEQ ID NO: 7680 - RNA, 21 nt, synthetic construct
  misc_feature 1..21: note = HBV-targeting guide sequence portion
  source 1..21: mol_type = other RNA
atcctaaattcaccaaatact

SEQ ID NO: 7681 - RNA, 21 nt, synthetic construct
  misc_feature 1..21: note = HBV-targeting guide sequence portion
  source 1..21: mol_type = other RNA
atcctatcaacacttccggag

SEQ ID NO: 7682 - RNA, 21 nt, synthetic construct
  misc_feature 1..21: note = HBV-targeting guide sequence portion
  source 1..21: mol_type = other RNA
atcctcacaataccgcagagt

SEQ ID NO: 7683 - RNA, 21 nt, synthetic construct
  misc_feature 1..21: note = HBV-targeting guide sequence portion
  source 1..21: mol_type = other RNA
atcctcgagaagattgacgat

SEQ ID NO: 7684 - RNA, 21 nt, synthetic construct
  misc_feature 1..21: note = HBV-targeting guide sequence portion
  source 1..21: mol_type = other RNA
atcctctgggattctttcccg

SEQ ID NO: 7685 - RNA, 21 nt, synthetic construct
  misc_feature 1..21: note = HBV-targeting guide sequence portion
  source 1..21: mol_type = other RNA
atcctgatgtgatgttctcca

SEQ ID NO: 7686 - RNA, 21 nt, synthetic construct
  misc_feature 1..21: note = HBV-targeting guide sequence portion
  source 1..21: mol_type = other RNA
atcctgcgcgggacgtccttt

SEQ ID NO: 7687 - RNA, 21 nt, synthetic construct
  misc_feature 1..21: note = HBV-targeting guide sequence portion
  source 1..21: mol_type = other RNA
atcctgctgctatgcctcatc

SEQ ID NO: 7688 - RNA, 21 nt, synthetic construct
  misc_feature 1..21: note = HBV-targeting guide sequence portion
  source 1..21: mol_type = other RNA
atcctgctttaatgcccttgt

SEQ ID NO: 7689 - RNA, 21 nt, synthetic construct
  misc_feature 1..21: note = HBV-targeting guide sequence portion
  source 1..21: mol_type = other RNA
atcctggaattagaggacaga

SEQ ID NO: 7690 - RNA, 21 nt, synthetic construct
  misc_feature 1..21: note = HBV-targeting guide sequence portion
  source 1..21: mol_type = other RNA
atcctgggctttcggaaaatt

SEQ ID NO: 7691 - RNA, 21 nt, synthetic construct
  misc_feature 1..21: note = HBV-targeting guide sequence portion
  source 1..21: mol_type = other RNA
atccttgttgggattgaagtc

SEQ ID NO: 7692 - RNA, 21 nt, synthetic construct
  misc_feature 1..21: note = HBV-targeting guide sequence portion
  source 1..21: mol_type = other RNA
atcgccagtcaggacggcagc

SEQ ID NO: 7693 - RNA, 21 nt, synthetic construct
  misc_feature 1..21: note = HBV-targeting guide sequence portion
  source 1..21: mol_type = other RNA
atcgccgcgtcgcagaagatc

SEQ ID NO: 7694 - RNA, 21 nt, synthetic construct
  misc_feature 1..21: note = HBV-targeting guide sequence portion
  source 1..21: mol_type = other RNA
atcgctggatgtgtctgcggc

SEQ ID NO: 7695 - RNA, 21 nt, synthetic construct
  misc_feature 1..21: note = HBV-targeting guide sequence portion
  source 1..21: mol_type = other RNA
atcggcagaggagccggaaag

SEQ ID NO: 7696 - RNA, 21 nt, synthetic construct
  misc_feature 1..21: note = HBV-targeting guide sequence portion
  source 1..21: mol_type = other RNA
atcgggatgccttggagtctc

SEQ ID NO: 7697 - RNA, 21 nt, synthetic construct
  misc_feature 1..21: note = HBV-targeting guide sequence portion
  source 1..21: mol_type = other RNA
atcgtcaatcttctcgaggat

SEQ ID NO: 7698 - RNA, 21 nt, synthetic construct
  misc_feature 1..21: note = HBV-targeting guide sequence portion
  source 1..21: mol_type = other RNA
atcgttcccatggctgctagg

SEQ ID NO: 7699 - RNA, 21 nt, synthetic construct
  misc_feature 1..21: note = HBV-targeting guide sequence portion
  source 1..21: mol_type = other RNA
atctaagcaggctttcacttt

SEQ ID NO: 7700 - RNA, 21 nt, synthetic construct
  misc_feature 1..21: note = HBV-targeting guide sequence portion
  source 1..21: mol_type = other RNA
atctaatctcctcccccaact

SEQ ID NO: 7701 - RNA, 21 nt, synthetic construct
  misc_feature 1..21: note = HBV-targeting guide sequence portion
  source 1..21: mol_type = other RNA
atctacaccaagatattatca

SEQ ID NO: 7702 - RNA, 21 nt, synthetic construct
  misc_feature 1..21: note = HBV-targeting guide sequence portion
  source 1..21: mol_type = other RNA
atctagaagatctcgtacgga

SEQ ID NO: 7703 - RNA, 21 nt, synthetic construct
  misc_feature 1..21: note = HBV-targeting guide sequence portion
  source 1..21: mol_type = other RNA
atctagggacctagtagtcag

SEQ ID NO: 7704 - RNA, 21 nt, synthetic construct
  misc_feature 1..21: note = HBV-targeting guide sequence portion
  source 1..21: mol_type = other RNA
atctagttaatcattacttcc

SEQ ID NO: 7705 - RNA, 21 nt, synthetic construct
  misc_feature 1..21: note = HBV-targeting guide sequence portion
  source 1..21: mol_type = other RNA
atctcaatcgccgcgtcgcag

SEQ ID NO: 7706 - RNA, 21 nt, synthetic construct
  misc_feature 1..21: note = HBV-targeting guide sequence portion
  source 1..21: mol_type = other RNA
atctcaatctcggggatctca

SEQ ID NO: 7707 - RNA, 21 nt, synthetic construct
  misc_feature 1..21: note = HBV-targeting guide sequence portion
  source 1..21: mol_type = other RNA
atctcaatgttagtatccctt

SEQ ID NO: 7708 - RNA, 21 nt, synthetic construct
  misc_feature 1..21: note = HBV-targeting guide sequence portion
  source 1..21: mol_type = other RNA
atctccctgctggtggctcca

SEQ ID NO: 7709 - RNA, 21 nt, synthetic construct
  misc_feature 1..21: note = HBV-targeting guide sequence portion
  source 1..21: mol_type = other RNA
atctcctcccccaactcctcc

SEQ ID NO: 7710 - RNA, 21 nt, synthetic construct
  misc_feature 1..21: note = HBV-targeting guide sequence portion
  source 1..21: mol_type = other RNA
atctcgaggccgcttggggcc

SEQ ID NO: 7711 - RNA, 21 nt, synthetic construct
  misc_feature 1..21: note = HBV-targeting guide sequence portion
  source 1..21: mol_type = other RNA
atctcggggatctcaatgtta

SEQ ID NO: 7712 - RNA, 21 nt, synthetic construct
  misc_feature 1..21: note = HBV-targeting guide sequence portion
  source 1..21: mol_type = other RNA
atctcgtacggaaggaaagaa

SEQ ID NO: 7713 - RNA, 21 nt, synthetic construct
  misc_feature 1..21: note = HBV-targeting guide sequence portion
  source 1..21: mol_type = other RNA
atctcttgttcatgtcctact

SEQ ID NO: 7714 - RNA, 21 nt, synthetic construct
  misc_feature 1..21: note = HBV-targeting guide sequence portion
  source 1..21: mol_type = other RNA
atctctttgttttgttagggt

SEQ ID NO: 7715 - RNA, 21 nt, synthetic construct
  misc_feature 1..21: note = HBV-targeting guide sequence portion
  source 1..21: mol_type = other RNA
atctgccggaccgtgtgcact

SEQ ID NO: 7716 - RNA, 21 nt, synthetic construct
  misc_feature 1..21: note = HBV-targeting guide sequence portion
  source 1..21: mol_type = other RNA
atctggattgttggagtttgc

SEQ ID NO: 7717 - RNA, 21 nt, synthetic construct
  misc_feature 1..21: note = HBV-targeting guide sequence portion
  source 1..21: mol_type = other RNA
atcttcctcttcatcctgctg

SEQ ID NO: 7718 - RNA, 21 nt, synthetic construct
  misc_feature 1..21: note = HBV-targeting guide sequence portion
  source 1..21: mol_type = other RNA
atcttcgtctgcgaggcgagg

SEQ ID NO: 7719 - RNA, 21 nt, synthetic construct
  misc_feature 1..21: note = HBV-targeting guide sequence portion
  source 1..21: mol_type = other RNA
atcttctaaattagtacccac

SEQ ID NO: 7720 - RNA, 21 nt, synthetic construct
  misc_feature 1..21: note = HBV-targeting guide sequence portion
  source 1..21: mol_type = other RNA
atcttctagataccgccgcag

SEQ ID NO: 7721 - RNA, 21 nt, synthetic construct
  misc_feature 1..21: note = HBV-targeting guide sequence portion
  source 1..21: mol_type = other RNA
atcttctcgaggattggggac

SEQ ID NO: 7722 - RNA, 21 nt, synthetic construct
  misc_feature 1..21: note = HBV-targeting guide sequence portion
  source 1..21: mol_type = other RNA
atcttctgcgacgcggcgatt

SEQ ID NO: 7723 - RNA, 21 nt, synthetic construct
  misc_feature 1..21: note = HBV-targeting guide sequence portion
  source 1..21: mol_type = other RNA
atcttcttgttggttcttctg

SEQ ID NO: 7724 - RNA, 21 nt, synthetic construct
  misc_feature 1..21: note = HBV-targeting guide sequence portion
  source 1..21: mol_type = other RNA
atcttgagtccctttataccg

SEQ ID NO: 7725 - RNA, 21 nt, synthetic construct
  misc_feature 1..21: note = HBV-targeting guide sequence portion
  source 1..21: mol_type = other RNA
atcttgcagagtttggtggaa

SEQ ID NO: 7726 - RNA, 21 nt, synthetic construct
  misc_feature 1..21: note = HBV-targeting guide sequence portion
  source 1..21: mol_type = other RNA
atcttggtgtagatgtatatt

SEQ ID NO: 7727 - RNA, 21 nt, synthetic construct
  misc_feature 1..21: note = HBV-targeting guide sequence portion
  source 1..21: mol_type = other RNA
atctttccaccagcaatcctc

SEQ ID NO: 7728 - RNA, 21 nt, synthetic construct
  misc_feature 1..21: note = HBV-targeting guide sequence portion
  source 1..21: mol_type = other RNA
atctttgtactaggaggctgt

SEQ ID NO: 7729 - RNA, 21 nt, synthetic construct
  misc_feature 1..21: note = HBV-targeting guide sequence portion
  source 1..21: mol_type = other RNA
atgaaattaagagaataaccc

SEQ ID NO: 7730 - RNA, 21 nt, synthetic construct
  misc_feature 1..21: note = HBV-targeting guide sequence portion
  source 1..21: mol_type = other RNA
atgaacaagagatgattaggc

SEQ ID NO: 7731 - RNA, 21 nt, synthetic construct
  misc_feature 1..21: note = HBV-targeting guide sequence portion
  source 1..21: mol_type = other RNA
atgaagaggaagatgataaaa

SEQ ID NO: 7732 - RNA, 21 nt, synthetic construct
  misc_feature 1..21: note = HBV-targeting guide sequence portion
  source 1..21: mol_type = other RNA
atgacatagcccatgaaatta

SEQ ID NO: 7733 - RNA, 21 nt, synthetic construct
  misc_feature 1..21: note = HBV-targeting guide sequence portion
  source 1..21: mol_type = other RNA
atgaccaagccccaaccagtg

SEQ ID NO: 7734 - RNA, 21 nt, synthetic construct
  misc_feature 1..21: note = HBV-targeting guide sequence portion
  source 1..21: mol_type = other RNA
atgactctagctacctgggtg

SEQ ID NO: 7735 - RNA, 21 nt, synthetic construct
  misc_feature 1..21: note = HBV-targeting guide sequence portion
  source 1..21: mol_type = other RNA
atgagaaaagacggttgaaat

SEQ ID NO: 7736 - RNA, 21 nt, synthetic construct
  misc_feature 1..21: note = HBV-targeting guide sequence portion
  source 1..21: mol_type = other RNA
atgagaaggcacagacgggga

SEQ ID NO: 7737 - RNA, 21 nt, synthetic construct
  misc_feature 1..21: note = HBV-targeting guide sequence portion
  source 1..21: mol_type = other RNA
atgaggcatagcagcaggatg

SEQ ID NO: 7738 - RNA, 21 nt, synthetic construct
  misc_feature 1..21: note = HBV-targeting guide sequence portion
  source 1..21: mol_type = other RNA
atgaggcgctatgtgttgaca

SEQ ID NO: 7739 - RNA, 21 nt, synthetic construct
  misc_feature 1..21: note = HBV-targeting guide sequence portion
  source 1..21: mol_type = other RNA
atgagggttaaagacaggtac

SEQ ID NO: 7740 - RNA, 21 nt, synthetic construct
  misc_feature 1..21: note = HBV-targeting guide sequence portion
  source 1..21: mol_type = other RNA
atgagtccaagggatactaac

SEQ ID NO: 7741 - RNA, 21 nt, synthetic construct
  misc_feature 1..21: note = HBV-targeting guide sequence portion
  source 1..21: mol_type = other RNA
atgagtgttgacataactgac

SEQ ID NO: 7742 - RNA, 21 nt, synthetic construct
  misc_feature 1..21: note = HBV-targeting guide sequence portion
  source 1..21: mol_type = other RNA
atgagtgtttctcagaggtgg

SEQ ID NO: 7743 - RNA, 21 nt, synthetic construct
  misc_feature 1..21: note = HBV-targeting guide sequence portion
  source 1..21: mol_type = other RNA
atgataaaacgccgcagacac

SEQ ID NO: 7744 - RNA, 21 nt, synthetic construct
  misc_feature 1..21: note = HBV-targeting guide sequence portion
  source 1..21: mol_type = other RNA
atgatccccaacaatcaatga

SEQ ID NO: 7745 - RNA, 21 nt, synthetic construct
  misc_feature 1..21: note = HBV-targeting guide sequence portion
  source 1..21: mol_type = other RNA
atgatcctggaattagaggac

SEQ ID NO: 7746 - RNA, 21 nt, synthetic construct
  misc_feature 1..21: note = HBV-targeting guide sequence portion
  source 1..21: mol_type = other RNA
atgatctttgtactaggaggc

SEQ ID NO: 7747 - RNA, 21 nt, synthetic construct
  misc_feature 1..21: note = HBV-targeting guide sequence portion
  source 1..21: mol_type = other RNA
atgatgggatgggaatacagg

SEQ ID NO: 7748 - RNA, 21 nt, synthetic construct
  misc_feature 1..21: note = HBV-targeting guide sequence portion
  source 1..21: mol_type = other RNA
atgatgtgattttgtggcaat

SEQ ID NO: 7749 - RNA, 21 nt, synthetic construct
  misc_feature 1..21: note = HBV-targeting guide sequence portion
  source 1..21: mol_type = other RNA
atgatgtggtattgggggcca

SEQ ID NO: 7750 - RNA, 21 nt, synthetic construct
  misc_feature 1..21: note = HBV-targeting guide sequence portion
  source 1..21: mol_type = other RNA
atgattaactagatgttctgg

SEQ ID NO: 7751 - RNA, 21 nt, synthetic construct
  misc_feature 1..21: note = HBV-targeting guide sequence portion
  source 1..21: mol_type = other RNA
atgattaggcagaggtgaaaa

SEQ ID NO: 7752 - RNA, 21 nt, synthetic construct
  misc_feature 1..21: note = HBV-targeting guide sequence portion
  source 1..21: mol_type = other RNA
atgcaaaccttgccagcaaat

SEQ ID NO: 7753 - RNA, 21 nt, synthetic construct
  misc_feature 1..21: note = HBV-targeting guide sequence portion
  source 1..21: mol_type = other RNA
atgcaacccccactggttggg

SEQ ID NO: 7754 - RNA, 21 nt, synthetic construct
  misc_feature 1..21: note = HBV-targeting guide sequence portion
  source 1..21: mol_type = other RNA
atgcaactttttcacctctgc

SEQ ID NO: 7755 - RNA, 21 nt, synthetic construct
  misc_feature 1..21: note = HBV-targeting guide sequence portion
  source 1..21: mol_type = other RNA
atgcatacaagggcattaaag

SEQ ID NO: 7756 - RNA, 21 nt, synthetic construct
  misc_feature 1..21: note = HBV-targeting guide sequence portion
  source 1..21: mol_type = other RNA
atgcatgtattcaatctaagc

SEQ ID NO: 7757 - RNA, 21 nt, synthetic construct
  misc_feature 1..21: note = HBV-targeting guide sequence portion
  source 1..21: mol_type = other RNA
atgcccctatcctatcaacac

SEQ ID NO: 7758 - RNA, 21 nt, synthetic construct
  misc_feature 1..21: note = HBV-targeting guide sequence portion
  source 1..21: mol_type = other RNA
atgccctaaagccacccaagg

SEQ ID NO: 7759 - RNA, 21 nt, synthetic construct
  misc_feature 1..21: note = HBV-targeting guide sequence portion
  source 1..21: mol_type = other RNA
atgccctgagcctgagggctc

SEQ ID NO: 7760 - RNA, 21 nt, synthetic construct
  misc_feature 1..21: note = HBV-targeting guide sequence portion
  source 1..21: mol_type = other RNA
atgcccttgtatgcatgtatt

SEQ ID NO: 7761 - RNA, 21 nt, synthetic construct
  misc_feature 1..21: note = HBV-targeting guide sequence portion
  source 1..21: mol_type = other RNA
atgcctacagcctcctagtac

SEQ ID NO: 7762 - RNA, 21 nt, synthetic construct
  misc_feature 1..21: note = HBV-targeting guide sequence portion
  source 1..21: mol_type = other RNA
atgcctcaaggtcggtcgttg

SEQ ID NO: 7763 - RNA, 21 nt, synthetic construct
  misc_feature 1..21: note = HBV-targeting guide sequence portion
  source 1..21: mol_type = other RNA
atgcctcatcttcttgttggt

SEQ ID NO: 7764 - RNA, 21 nt, synthetic construct
  misc_feature 1..21: note = HBV-targeting guide sequence portion
  source 1..21: mol_type = other RNA
atgcctgctaggttttatcct

SEQ ID NO: 7765 - RNA, 21 nt, synthetic construct
  misc_feature 1..21: note = HBV-targeting guide sequence portion
  source 1..21: mol_type = other RNA
atgccttggagtctcctgagc

SEQ ID NO: 7766 - RNA, 21 nt, synthetic construct
  misc_feature 1..21: note = HBV-targeting guide sequence portion
  source 1..21: mol_type = other RNA
atgcgacgtgcagaggtgaag

SEQ ID NO: 7767 - RNA, 21 nt, synthetic construct
  misc_feature 1..21: note = HBV-targeting guide sequence portion
  source 1..21: mol_type = other RNA
atgcgctgatggcctatgacc

SEQ ID NO: 7768 - RNA, 21 nt, synthetic construct
  misc_feature 1..21: note = HBV-targeting guide sequence portion
  source 1..21: mol_type = other RNA
atgcgtggaacctttccggct

SEQ ID NO: 7769 - RNA, 21 nt, synthetic construct
  misc_feature 1..21: note = HBV-targeting guide sequence portion
  source 1..21: mol_type = other RNA
atgctcaggagactccaaggc

SEQ ID NO: 7770 - RNA, 21 nt, synthetic construct
  misc_feature 1..21: note = HBV-targeting guide sequence portion
  source 1..21: mol_type = other RNA
atgctccagctcctaccttgt

SEQ ID NO: 7771 - RNA, 21 nt, synthetic construct
  misc_feature 1..21: note = HBV-targeting guide sequence portion
  source 1..21: mol_type = other RNA
atgctgtacagacttggcccc

SEQ ID NO: 7772 - RNA, 21 nt, synthetic construct
  misc_feature 1..21: note = HBV-targeting guide sequence portion
  source 1..21: mol_type = other RNA
atgctgtagctcttgttccca

SEQ ID NO: 7773 - RNA, 21 nt, synthetic construct
  misc_feature 1..21: note = HBV-targeting guide sequence portion
  source 1..21: mol_type = other RNA
atgcttgatcttctaaattag

SEQ ID NO: 7774 - RNA, 21 nt, synthetic construct
  misc_feature 1..21: note = HBV-targeting guide sequence portion
  source 1..21: mol_type = other RNA
atggaaactgcacctgtattc

SEQ ID NO: 7775 - RNA, 21 nt, synthetic construct
  misc_feature 1..21: note = HBV-targeting guide sequence portion
  source 1..21: mol_type = other RNA
atggaaggcgggtgttttata

SEQ ID NO: 7776 - RNA, 21 nt, synthetic construct
  misc_feature 1..21: note = HBV-targeting guide sequence portion
  source 1..21: mol_type = other RNA
atggacattgacccatataaa

SEQ ID NO: 7777 - RNA, 21 nt, synthetic construct
  misc_feature 1..21: note = HBV-targeting guide sequence portion
  source 1..21: mol_type = other RNA
atggagaacatcacatcagga

SEQ ID NO: 7778 - RNA, 21 nt, synthetic construct
  misc_feature 1..21: note = HBV-targeting guide sequence portion
  source 1..21: mol_type = other RNA
atggagaccaccgtgaacgcc

SEQ ID NO: 7779 - RNA, 21 nt, synthetic construct
  misc_feature 1..21: note = HBV-targeting guide sequence portion
  source 1..21: mol_type = other RNA
atggatcggcagaggagccgg

SEQ ID NO: 7780 - RNA, 21 nt, synthetic construct
  misc_feature 1..21: note = HBV-targeting guide sequence portion
  source 1..21: mol_type = other RNA
atggatgatgtggtattgggg

SEQ ID NO: 7781 - RNA, 21 nt, synthetic construct
  misc_feature 1..21: note = HBV-targeting guide sequence portion
  source 1..21: mol_type = other RNA
atggcactagtaaactgagcc

SEQ ID NO: 7782 - RNA, 21 nt, synthetic construct
  misc_feature 1..21: note = HBV-targeting guide sequence portion
  source 1..21: mol_type = other RNA
atggcctatgaccaagcccca

SEQ ID NO: 7783 - RNA, 21 nt, synthetic construct
  misc_feature 1..21: note = HBV-targeting guide sequence portion
  source 1..21: mol_type = other RNA
atggcctgaggatgagtgttt

SEQ ID NO: 7784 - RNA, 21 nt, synthetic construct
  misc_feature 1..21: note = HBV-targeting guide sequence portion
  source 1..21: mol_type = other RNA
atggctgctaggctgtgctgc

SEQ ID NO: 7785 - RNA, 21 nt, synthetic construct
  misc_feature 1..21: note = HBV-targeting guide sequence portion
  source 1..21: mol_type = other RNA
atgggaacgatgtatatttgc

SEQ ID NO: 7786 - RNA, 21 nt, synthetic construct
  misc_feature 1..21: note = HBV-targeting guide sequence portion
  source 1..21: mol_type = other RNA
atgggaatacaggtgcagttt

SEQ ID NO: 7787 - RNA, 21 nt, synthetic construct
  misc_feature 1..21: note = HBV-targeting guide sequence portion
  source 1..21: mol_type = other RNA
atgggagtgggcctcagcccg

SEQ ID NO: 7788 - RNA, 21 nt, synthetic construct
  misc_feature 1..21: note = HBV-targeting guide sequence portion
  source 1..21: mol_type = other RNA
atgggatgggaatacaggtgc

SEQ ID NO: 7789 - RNA, 21 nt, synthetic construct
  misc_feature 1..21: note = HBV-targeting guide sequence portion
  source 1..21: mol_type = other RNA
atgggcctaaagttcagacaa

SEQ ID NO: 7790 - RNA, 21 nt, synthetic construct
  misc_feature 1..21: note = HBV-targeting guide sequence portion
  source 1..21: mol_type = other RNA
atgggctatgtcattgattgt

SEQ ID NO: 7791 - RNA, 21 nt, synthetic construct
  misc_feature 1..21: note = HBV-targeting guide sequence portion
  source 1..21: mol_type = other RNA
atggggcagaatctttccacc

SEQ ID NO: 7792 - RNA, 21 nt, synthetic construct
  misc_feature 1..21: note = HBV-targeting guide sequence portion
  source 1..21: mol_type = other RNA
atggggttattctcttaattt

SEQ ID NO: 7793 - RNA, 21 nt, synthetic construct
  misc_feature 1..21: note = HBV-targeting guide sequence portion
  source 1..21: mol_type = other RNA
atgggtcaatgtccatgccct

SEQ ID NO: 7794 - RNA, 21 nt, synthetic construct
  misc_feature 1..21: note = HBV-targeting guide sequence portion
  source 1..21: mol_type = other RNA
atgggtcgtccgcgggattca

SEQ ID NO: 7795 - RNA, 21 nt, synthetic construct
  misc_feature 1..21: note = HBV-targeting guide sequence portion
  source 1..21: mol_type = other RNA
atggtgacccacagaatgagg

SEQ ID NO: 7796 - RNA, 21 nt, synthetic construct
  misc_feature 1..21: note = HBV-targeting guide sequence portion
  source 1..21: mol_type = other RNA
atggtgaggtgaacaatgctc

SEQ ID NO: 7797 - RNA, 21 nt, synthetic construct
  misc_feature 1..21: note = HBV-targeting guide sequence portion
  source 1..21: mol_type = other RNA
atggtgctggtgcgcagacca

SEQ ID NO: 7798 - RNA, 21 nt, synthetic construct
  misc_feature 1..21: note = HBV-targeting guide sequence portion
  source 1..21: mol_type = other RNA
atgtaagaccttgggcaagaa

SEQ ID NO: 7799 - RNA, 21 nt, synthetic construct
  misc_feature 1..21: note = HBV-targeting guide sequence portion
  source 1..21: mol_type = other RNA
atgtacacccaaagacaaaag

SEQ ID NO: 7800 - RNA, 21 nt, synthetic construct
  misc_feature 1..21: note = HBV-targeting guide sequence portion
  source 1..21: mol_type = other RNA
atgtatattaggaaaagaggg

SEQ ID NO: 7801 - RNA, 21 nt, synthetic construct
  misc_feature 1..21: note = HBV-targeting guide sequence portion
  source 1..21: mol_type = other RNA
atgtatatttgcgggagagga

SEQ ID NO: 7802 - RNA, 21 nt, synthetic construct
  misc_feature 1..21: note = HBV-targeting guide sequence portion
  source 1..21: mol_type = other RNA
atgtatccctcctgttgctgt

SEQ ID NO: 7803 - RNA, 21 nt, synthetic construct
  misc_feature 1..21: note = HBV-targeting guide sequence portion
  source 1..21: mol_type = other RNA
atgtattcaatctaagcaggc

SEQ ID NO: 7804 - RNA, 21 nt, synthetic construct
  misc_feature 1..21: note = HBV-targeting guide sequence portion
  source 1..21: mol_type = other RNA
atgtcaacactcatatgggcc

SEQ ID NO: 7805 - RNA, 21 nt, synthetic construct
  misc_feature 1..21: note = HBV-targeting guide sequence portion
  source 1..21: mol_type = other RNA
atgtcaacgaccgaccttgag

SEQ ID NO: 7806 - RNA, 21 nt, synthetic construct
  misc_feature 1..21: note = HBV-targeting guide sequence portion
  source 1..21: mol_type = other RNA
atgtcattgattgttggggat

SEQ ID NO: 7807 - RNA, 21 nt, synthetic construct
  misc_feature 1..21: note = HBV-targeting guide sequence portion
  source 1..21: mol_type = other RNA
atgtccatgccctaaagccac

SEQ ID NO: 7808 - RNA, 21 nt, synthetic construct
  misc_feature 1..21: note = HBV-targeting guide sequence portion
  source 1..21: mol_type = other RNA
atgtcctactgttcaagcctc

SEQ ID NO: 7809 - RNA, 21 nt, synthetic construct
  misc_feature 1..21: note = HBV-targeting guide sequence portion
  source 1..21: mol_type = other RNA
atgtgaaaccacaatagttgt

SEQ ID NO: 7810 - RNA, 21 nt, synthetic construct
  misc_feature 1..21: note = HBV-targeting guide sequence portion
  source 1..21: mol_type = other RNA
atgtgaacagtttgtaggccc

SEQ ID NO: 7811 - RNA, 21 nt, synthetic construct
  misc_feature 1..21: note = HBV-targeting guide sequence portion
  source 1..21: mol_type = other RNA
atgtgagaggcagtagtcgga

SEQ ID NO: 7812 - RNA, 21 nt, synthetic construct
  misc_feature 1..21: note = HBV-targeting guide sequence portion
  source 1..21: mol_type = other RNA
atgtgatgttctccatgttca

SEQ ID NO: 7813 - RNA, 21 nt, synthetic construct
  misc_feature 1..21: note = HBV-targeting guide sequence portion
  source 1..21: mol_type = other RNA
atgtgattttgtggcaatgat

SEQ ID NO: 7814 - RNA, 21 nt, synthetic construct
  misc_feature 1..21: note = HBV-targeting guide sequence portion
  source 1..21: mol_type = other RNA
atgtggtattgggggccaagt

SEQ ID NO: 7815 - RNA, 21 nt, synthetic construct
  misc_feature 1..21: note = HBV-targeting guide sequence portion
  source 1..21: mol_type = other RNA
atgtggttatcctgctttaat

SEQ ID NO: 7816 - RNA, 21 nt, synthetic construct
  misc_feature 1..21: note = HBV-targeting guide sequence portion
  source 1..21: mol_type = other RNA
atgtgtctgcggcgttttatc

SEQ ID NO: 7817 - RNA, 21 nt, synthetic construct
  misc_feature 1..21: note = HBV-targeting guide sequence portion
  source 1..21: mol_type = other RNA
atgtgttgacactctcttata

SEQ ID NO: 7818 - RNA, 21 nt, synthetic construct
  misc_feature 1..21: note = HBV-targeting guide sequence portion
  source 1..21: mol_type = other RNA
atgttagtatcccttggactc

SEQ ID NO: 7819 - RNA, 21 nt, synthetic construct
  misc_feature 1..21: note = HBV-targeting guide sequence portion
  source 1..21: mol_type = other RNA
atgttcagcgcagggtcccca

SEQ ID NO: 7820 - RNA, 21 nt, synthetic construct
  misc_feature 1..21: note = HBV-targeting guide sequence portion
  source 1..21: mol_type = other RNA
atgttctccatgttcagcgca

SEQ ID NO: 7821 - RNA, 21 nt, synthetic construct
  misc_feature 1..21: note = HBV-targeting guide sequence portion
  source 1..21: mol_type = other RNA
atgttctggataataaggttt

SEQ ID NO: 7822 - RNA, 21 nt, synthetic construct
  misc_feature 1..21: note = HBV-targeting guide sequence portion
  source 1..21: mol_type = other RNA
atgtttcagaaaactcccggt

SEQ ID NO: 7823 - RNA, 21 nt, synthetic construct
  misc_feature 1..21: note = HBV-targeting guide sequence portion
  source 1..21: mol_type = other RNA
atgtttcccgtctgtcctcta

SEQ ID NO: 7824 - RNA, 21 nt, synthetic construct
  misc_feature 1..21: note = HBV-targeting guide sequence portion
  source 1..21: mol_type = other RNA
atgtttgctccagaccggctg

SEQ ID NO: 7825 - RNA, 21 nt, synthetic construct
  misc_feature 1..21: note = HBV-targeting guide sequence portion
  source 1..21: mol_type = other RNA
attaaaccttattatccagaa

SEQ ID NO: 7826 - RNA, 21 nt, synthetic construct
  misc_feature 1..21: note = HBV-targeting guide sequence portion
  source 1..21: mol_type = other RNA
attaaagcaggataaccacat

SEQ ID NO: 7827 - RNA, 21 nt, synthetic construct
  misc_feature 1..21: note = HBV-targeting guide sequence portion
  source 1..21: mol_type = other RNA
attaactagatgttctggata

SEQ ID NO: 7828 - RNA, 21 nt, synthetic construct
  misc_feature 1..21: note = HBV-targeting guide sequence portion
  source 1..21: mol_type = other RNA
attaactgtaagcgggcctac

SEQ ID NO: 7829 - RNA, 21 nt, synthetic construct
  misc_feature 1..21: note = HBV-targeting guide sequence portion
  source 1..21: mol_type = other RNA
attaagagaataaccccatct

SEQ ID NO: 7830 - RNA, 21 nt, synthetic construct
  misc_feature 1..21: note = HBV-targeting guide sequence portion
  source 1..21: mol_type = other RNA
attaatctaatctcctccccc

SEQ ID NO: 7831 - RNA, 21 nt, synthetic construct
  misc_feature 1..21: note = HBV-targeting guide sequence portion
  source 1..21: mol_type = other RNA
attaatgatctttgtactagg

SEQ ID NO: 7832 - RNA, 21 nt, synthetic construct
  misc_feature 1..21: note = HBV-targeting guide sequence portion
  source 1..21: mol_type = other RNA
attacttccaaactagacact

SEQ ID NO: 7833 - RNA, 21 nt, synthetic construct
  misc_feature 1..21: note = HBV-targeting guide sequence portion
  source 1..21: mol_type = other RNA
attagaggacagacgggaaac

SEQ ID NO: 7834 - RNA, 21 nt, synthetic construct
  misc_feature 1..21: note = HBV-targeting guide sequence portion
  source 1..21: mol_type = other RNA
attagattaatgatctttgta

SEQ ID NO: 7835 - RNA, 21 nt, synthetic construct
  misc_feature 1..21: note = HBV-targeting guide sequence portion
  source 1..21: mol_type = other RNA
attaggaaaagagggtgtttt

SEQ ID NO: 7836 - RNA, 21 nt, synthetic construct
  misc_feature 1..21: note = HBV-targeting guide sequence portion
  source 1..21: mol_type = other RNA
attaggcagaggtgaaaaagt

SEQ ID NO: 7837 - RNA, 21 nt, synthetic construct
  misc_feature 1..21: note = HBV-targeting guide sequence portion
  source 1..21: mol_type = other RNA
attagtacccacccaggtagc

SEQ ID NO: 7838 - RNA, 21 nt, synthetic construct
  misc_feature 1..21: note = HBV-targeting guide sequence portion
  source 1..21: mol_type = other RNA
attagttctccccagcaaaga

SEQ ID NO: 7839 - RNA, 21 nt, synthetic construct
  misc_feature 1..21: note = HBV-targeting guide sequence portion
  source 1..21: mol_type = other RNA
attatcaaaaaatgtgaacag

SEQ ID NO: 7840 - RNA, 21 nt, synthetic construct
  misc_feature 1..21: note = HBV-targeting guide sequence portion
  source 1..21: mol_type = other RNA
attatccagaacatctagtta

SEQ ID NO: 7841 - RNA, 21 nt, synthetic construct
  misc_feature 1..21: note = HBV-targeting guide sequence portion
  source 1..21: mol_type = other RNA
attatgccctgagcctgaggg

SEQ ID NO: 7842 - RNA, 21 nt, synthetic construct
  misc_feature 1..21: note = HBV-targeting guide sequence portion
  source 1..21: mol_type = other RNA
attatgcctgctaggttttat

SEQ ID NO: 7843 - RNA, 21 nt, synthetic construct
  misc_feature 1..21: note = HBV-targeting guide sequence portion
  source 1..21: mol_type = other RNA
attcaatctaagcaggctttc

SEQ ID NO: 7844 - RNA, 21 nt, synthetic construct
  misc_feature 1..21: note = HBV-targeting guide sequence portion
  source 1..21: mol_type = other RNA
attcaccaaatacttgccctt

SEQ ID NO: 7845 - RNA, 21 nt, synthetic construct
  misc_feature 1..21: note = HBV-targeting guide sequence portion
  source 1..21: mol_type = other RNA
attcagcgccgacgggacgta

SEQ ID NO: 7846 - RNA, 21 nt, synthetic construct
  misc_feature 1..21: note = HBV-targeting guide sequence portion
  source 1..21: mol_type = other RNA
attccaggatcatcaaccacc

SEQ ID NO: 7847 - RNA, 21 nt, synthetic construct
  misc_feature 1..21: note = HBV-targeting guide sequence portion
  source 1..21: mol_type = other RNA
attcccatcccatcatcctgg

SEQ ID NO: 7848 - RNA, 21 nt, synthetic construct
  misc_feature 1..21: note = HBV-targeting guide sequence portion
  source 1..21: mol_type = other RNA
attcctaggacccctgctcgt

SEQ ID NO: 7849 - RNA, 21 nt, synthetic construct
  misc_feature 1..21: note = HBV-targeting guide sequence portion
  source 1..21: mol_type = other RNA
attcctatgggagtgggcctc

SEQ ID NO: 7850 - RNA, 21 nt, synthetic construct
  misc_feature 1..21: note = HBV-targeting guide sequence portion
  source 1..21: mol_type = other RNA
attcgcactcctccagcttat

SEQ ID NO: 7851 - RNA, 21 nt, synthetic construct
  misc_feature 1..21: note = HBV-targeting guide sequence portion
  source 1..21: mol_type = other RNA
attcgcagtccccaacctcca

SEQ ID NO: 7852 - RNA, 21 nt, synthetic construct
  misc_feature 1..21: note = HBV-targeting guide sequence portion
  source 1..21: mol_type = other RNA
attcgggctagggttcacccc

SEQ ID NO: 7853 - RNA, 21 nt, synthetic construct
  misc_feature 1..21: note = HBV-targeting guide sequence portion
  source 1..21: mol_type = other RNA
attcgttgacacactttccaa

SEQ ID NO: 7854 - RNA, 21 nt, synthetic construct
  misc_feature 1..21: note = HBV-targeting guide sequence portion
  source 1..21: mol_type = other RNA
attctcgggactgacaactct

SEQ ID NO: 7855 - RNA, 21 nt, synthetic construct
  misc_feature 1..21: note = HBV-targeting guide sequence portion
  source 1..21: mol_type = other RNA
attctcttaatttcatgggct

SEQ ID NO: 7856 - RNA, 21 nt, synthetic construct
  misc_feature 1..21: note = HBV-targeting guide sequence portion
  source 1..21: mol_type = other RNA
attctgccccatgctgtagct

SEQ ID NO: 7857 - RNA, 21 nt, synthetic construct
  misc_feature 1..21: note = HBV-targeting guide sequence portion
  source 1..21: mol_type = other RNA
attctgtgggtcaccatattc

SEQ ID NO: 7858 - RNA, 21 nt, synthetic construct
  misc_feature 1..21: note = HBV-targeting guide sequence portion
  source 1..21: mol_type = other RNA
attcttctactgtacctgtct

SEQ ID NO: 7859 - RNA, 21 nt, synthetic construct
  misc_feature 1..21: note = HBV-targeting guide sequence portion
  source 1..21: mol_type = other RNA
attcttgcccaaggtcttaca

SEQ ID NO: 7860 - RNA, 21 nt, synthetic construct
  misc_feature 1..21: note = HBV-targeting guide sequence portion
  source 1..21: mol_type = other RNA
attcttgggaacaagagctac

SEQ ID NO: 7861 - RNA, 21 nt, synthetic construct
  misc_feature 1..21: note = HBV-targeting guide sequence portion
  source 1..21: mol_type = other RNA
attcttgtcaacaaggaaaac

SEQ ID NO: 7862 - RNA, 21 nt, synthetic construct
  misc_feature 1..21: note = HBV-targeting guide sequence portion
  source 1..21: mol_type = other RNA
attctttatatgggtcaatgt

SEQ ID NO: 7863 - RNA, 21 nt, synthetic construct
  misc_feature 1..21: note = HBV-targeting guide sequence portion
  source 1..21: mol_type = other RNA
attctttcccgaccaccagtt

SEQ ID NO: 7864 - RNA, 21 nt, synthetic construct
  misc_feature 1..21: note = HBV-targeting guide sequence portion
  source 1..21: mol_type = other RNA
attctttgattttgtgtatga

SEQ ID NO: 7865 - RNA, 21 nt, synthetic construct
  misc_feature 1..21: note = HBV-targeting guide sequence portion
  source 1..21: mol_type = other RNA
attctttgctggggagaacta

SEQ ID NO: 7866 - RNA, 21 nt, synthetic construct
  misc_feature 1..21: note = HBV-targeting guide sequence portion
  source 1..21: mol_type = other RNA
attgaagtcccaatctggatt

SEQ ID NO: 7867 - RNA, 21 nt, synthetic construct
  misc_feature 1..21: note = HBV-targeting guide sequence portion
  source 1..21: mol_type = other RNA
attgaatacatgcatacaagg

SEQ ID NO: 7868 - RNA, 21 nt, synthetic construct
  misc_feature 1..21: note = HBV-targeting guide sequence portion
  source 1..21: mol_type = other RNA
attgacccatataaagaattt

SEQ ID NO: 7869 - RNA, 21 nt, synthetic construct
  misc_feature 1..21: note = HBV-targeting guide sequence portion
  source 1..21: mol_type = other RNA
attgacgatatgtgagaggca

SEQ ID NO: 7870 - RNA, 21 nt, synthetic construct
  misc_feature 1..21: note = HBV-targeting guide sequence portion
  source 1..21: mol_type = other RNA
attgagagaagtccaccacga

SEQ ID NO: 7871 - RNA, 21 nt, synthetic construct
  misc_feature 1..21: note = HBV-targeting guide sequence portion
  source 1..21: mol_type = other RNA
attgagatccccgagattgag

SEQ ID NO: 7872 - RNA, 21 nt, synthetic construct
  misc_feature 1..21: note = HBV-targeting guide sequence portion
  source 1..21: mol_type = other RNA
attgagatcttcgtctgcgag

SEQ ID NO: 7873 - RNA, 21 nt, synthetic construct
  misc_feature 1..21: note = HBV-targeting guide sequence portion
  source 1..21: mol_type = other RNA
attgagatcttctgcgacgcg

SEQ ID NO: 7874 - RNA, 21 nt, synthetic construct
  misc_feature 1..21: note = HBV-targeting guide sequence portion
  source 1..21: mol_type = other RNA
attgattatgcctgctaggtt

SEQ ID NO: 7875 - RNA, 21 nt, synthetic construct
  misc_feature 1..21: note = HBV-targeting guide sequence portion
  source 1..21: mol_type = other RNA
attgattggaaagtgtgtcaa

SEQ ID NO: 7876 - RNA, 21 nt, synthetic construct
  misc_feature 1..21: note = HBV-targeting guide sequence portion
  source 1..21: mol_type = other RNA
attgattgttggggatcattg

SEQ ID NO: 7877 - RNA, 21 nt, synthetic construct
  misc_feature 1..21: note = HBV-targeting guide sequence portion
  source 1..21: mol_type = other RNA
attgcagagagtccaagagtc

SEQ ID NO: 7878 - RNA, 21 nt, synthetic construct
  misc_feature 1..21: note = HBV-targeting guide sequence portion
  source 1..21: mol_type = other RNA
attgccacaaaatcacatcat

SEQ ID NO: 7879 - RNA, 21 nt, synthetic construct
  misc_feature 1..21: note = HBV-targeting guide sequence portion
  source 1..21: mol_type = other RNA
attgctggtggaaagattctg

SEQ ID NO: 7880 - RNA, 21 nt, synthetic construct
  misc_feature 1..21: note = HBV-targeting guide sequence portion
  source 1..21: mol_type = other RNA
attgcttgcctgagtgcagta

SEQ ID NO: 7881 - RNA, 21 nt, synthetic construct
  misc_feature 1..21: note = HBV-targeting guide sequence portion
  source 1..21: mol_type = other RNA
attggaaaacaccctcttttc

SEQ ID NO: 7882 - RNA, 21 nt, synthetic construct
  misc_feature 1..21: note = HBV-targeting guide sequence portion
  source 1..21: mol_type = other RNA
attggaaagtgtgtcaacgaa

SEQ ID NO: 7883 - RNA, 21 nt, synthetic construct
  misc_feature 1..21: note = HBV-targeting guide sequence portion
  source 1..21: mol_type = other RNA
attggaggttggggactgcga

SEQ ID NO: 7884 - RNA, 21 nt, synthetic construct
  misc_feature 1..21: note = HBV-targeting guide sequence portion
  source 1..21: mol_type = other RNA
attgggacttcaatcccaaca

SEQ ID NO: 7885 - RNA, 21 nt, synthetic construct
  misc_feature 1..21: note = HBV-targeting guide sequence portion
  source 1..21: mol_type = other RNA
attggggaccctgcgctgaac

SEQ ID NO: 7886 - RNA, 21 nt, synthetic construct
  misc_feature 1..21: note = HBV-targeting guide sequence portion
  source 1..21: mol_type = other RNA
attgggggccaagtctgtaca

SEQ ID NO: 7887 - RNA, 21 nt, synthetic construct
  misc_feature 1..21: note = HBV-targeting guide sequence portion
  source 1..21: mol_type = other RNA
attggtaacagcggtataaag

SEQ ID NO: 7888 - RNA, 21 nt, synthetic construct
  misc_feature 1..21: note = HBV-targeting guide sequence portion
  source 1..21: mol_type = other RNA
attggtagaggcaggaggcgg

SEQ ID NO: 7889 - RNA, 21 nt, synthetic construct
  misc_feature 1..21: note = HBV-targeting guide sequence portion
  source 1..21: mol_type = other RNA
attggtctgcgcaccagcacc

SEQ ID NO: 7890 - RNA, 21 nt, synthetic construct
  misc_feature 1..21: note = HBV-targeting guide sequence portion
  source 1..21: mol_type = other RNA
attggtgggcgttcacggtgg

SEQ ID NO: 7891 - RNA, 21 nt, synthetic construct
  misc_feature 1..21: note = HBV-targeting guide sequence portion
  source 1..21: mol_type = other RNA
attgtgaggattcttgtcaac

SEQ ID NO: 7892 - RNA, 21 nt, synthetic construct
  misc_feature 1..21: note = HBV-targeting guide sequence portion
  source 1..21: mol_type = other RNA
attgtgggtcttctgggtttt

SEQ ID NO: 7893 - RNA, 21 nt, synthetic construct
  misc_feature 1..21: note = HBV-targeting guide sequence portion
  source 1..21: mol_type = other RNA
attgtggtttcacatttcttg

SEQ ID NO: 7894 - RNA, 21 nt, synthetic construct
  misc_feature 1..21: note = HBV-targeting guide sequence portion
  source 1..21: mol_type = other RNA
attgtgtaaaaggggcagcaa

SEQ ID NO: 7895 - RNA, 21 nt, synthetic construct
  misc_feature 1..21: note = HBV-targeting guide sequence portion
  source 1..21: mol_type = other RNA
attgttcacctcaccatactg

SEQ ID NO: 7896 - RNA, 21 nt, synthetic construct
  misc_feature 1..21: note = HBV-targeting guide sequence portion
  source 1..21: mol_type = other RNA
attgttggagtttgctctgaa

SEQ ID NO: 7897 - RNA, 21 nt, synthetic construct
  misc_feature 1..21: note = HBV-targeting guide sequence portion
  source 1..21: mol_type = other RNA
attgttggggatcattgccac

SEQ ID NO: 7898 - RNA, 21 nt, synthetic construct
  misc_feature 1..21: note = HBV-targeting guide sequence portion
  source 1..21: mol_type = other RNA
attgtttacacagaaaggcct

SEQ ID NO: 7899 - RNA, 21 nt, synthetic construct
  misc_feature 1..21: note = HBV-targeting guide sequence portion
  source 1..21: mol_type = other RNA
atttaaaccctaacaaaacaa

SEQ ID NO: 7900 - RNA, 21 nt, synthetic construct
  misc_feature 1..21: note = HBV-targeting guide sequence portion
  source 1..21: mol_type = other RNA
atttacacactctatggaagg

SEQ ID NO: 7901 - RNA, 21 nt, synthetic construct
  misc_feature 1..21: note = HBV-targeting guide sequence portion
  source 1..21: mol_type = other RNA
atttagaagatcaagcatcta

SEQ ID NO: 7902 - RNA, 21 nt, synthetic construct
  misc_feature 1..21: note = HBV-targeting guide sequence portion
  source 1..21: mol_type = other RNA
atttaggataaaacctagcag

SEQ ID NO: 7903 - RNA, 21 nt, synthetic construct
  misc_feature 1..21: note = HBV-targeting guide sequence portion
  source 1..21: mol_type = other RNA
atttatgcctacagcctccta

SEQ ID NO: 7904 - RNA, 21 nt, synthetic construct
  misc_feature 1..21: note = HBV-targeting guide sequence portion
  source 1..21: mol_type = other RNA
atttcaaccgtcttttctcat

SEQ ID NO: 7905 - RNA, 21 nt, synthetic construct
  misc_feature 1..21: note = HBV-targeting guide sequence portion
  source 1..21: mol_type = other RNA
atttcatgggctatgtcattg

SEQ ID NO: 7906 - RNA, 21 nt, synthetic construct
  misc_feature 1..21: note = HBV-targeting guide sequence portion
  source 1..21: mol_type = other RNA
atttcccaccttatgagtcca

SEQ ID NO: 7907 - RNA, 21 nt, synthetic construct
  misc_feature 1..21: note = HBV-targeting guide sequence portion
  source 1..21: mol_type = other RNA
atttcttgtcttacttttgga

SEQ ID NO: 7908 - RNA, 21 nt, synthetic construct
  misc_feature 1..21: note = HBV-targeting guide sequence portion
  source 1..21: mol_type = other RNA
atttgcgggagaggacaacag

SEQ ID NO: 7909 - RNA, 21 nt, synthetic construct
  misc_feature 1..21: note = HBV-targeting guide sequence portion
  source 1..21: mol_type = other RNA
atttgctggcaaggtttgcat

SEQ ID NO: 7910 - RNA, 21 nt, synthetic construct
  misc_feature 1..21: note = HBV-targeting guide sequence portion
  source 1..21: mol_type = other RNA
atttggagctactgtggagtt

SEQ ID NO: 7911 - RNA, 21 nt, synthetic construct
  misc_feature 1..21: note = HBV-targeting guide sequence portion
  source 1..21: mol_type = other RNA
atttggtgaatttaggataaa

SEQ ID NO: 7912 - RNA, 21 nt, synthetic construct
  misc_feature 1..21: note = HBV-targeting guide sequence portion
  source 1..21: mol_type = other RNA
atttggtggtctataagctgg

SEQ ID NO: 7913 - RNA, 21 nt, synthetic construct
  misc_feature 1..21: note = HBV-targeting guide sequence portion
  source 1..21: mol_type = other RNA
atttggtgtcttttggagtgt

SEQ ID NO: 7914 - RNA, 21 nt, synthetic construct
  misc_feature 1..21: note = HBV-targeting guide sequence portion
  source 1..21: mol_type = other RNA
atttgttcagtggttcgtagg

SEQ ID NO: 7915 - RNA, 21 nt, synthetic construct
  misc_feature 1..21: note = HBV-targeting guide sequence portion
  source 1..21: mol_type = other RNA
attttacggggctttattctt

SEQ ID NO: 7916 - RNA, 21 nt, synthetic construct
  misc_feature 1..21: note = HBV-targeting guide sequence portion
  source 1..21: mol_type = other RNA
attttccgaaagcccaggatg

SEQ ID NO: 7917 - RNA, 21 nt, synthetic construct
  misc_feature 1..21: note = HBV-targeting guide sequence portion
  source 1..21: mol_type = other RNA
attttctagggggaactaccg

SEQ ID NO: 7918 - RNA, 21 nt, synthetic construct
  misc_feature 1..21: note = HBV-targeting guide sequence portion
  source 1..21: mol_type = other RNA
attttcttttgtctttgggtg

SEQ ID NO: 7919 - RNA, 21 nt, synthetic construct
  misc_feature 1..21: note = HBV-targeting guide sequence portion
  source 1..21: mol_type = other RNA
attttggccaagacacacggt

SEQ ID NO: 7920 - RNA, 21 nt, synthetic construct
  misc_feature 1..21: note = HBV-targeting guide sequence portion
  source 1..21: mol_type = other RNA
attttgtggcaatgatcccca

SEQ ID NO: 7921 - RNA, 21 nt, synthetic construct
  misc_feature 1..21: note = HBV-targeting guide sequence portion
  source 1..21: mol_type = other RNA
attttgtgtatgatgtgattt

SEQ ID NO: 7922 - RNA, 21 nt, synthetic construct
  misc_feature 1..21: note = HBV-targeting guide sequence portion
  source 1..21: mol_type = other RNA
attttttgataatatcttggt

SEQ ID NO: 7923 - RNA, 21 nt, synthetic construct
  misc_feature 1..21: note = HBV-targeting guide sequence portion
  source 1..21: mol_type = other RNA
caaaaaatgtgaacagtttgt

SEQ ID NO: 7924 - RNA, 21 nt, synthetic construct
  misc_feature 1..21: note = HBV-targeting guide sequence portion
  source 1..21: mol_type = other RNA
caaaaacgagagtaactccac

SEQ ID NO: 7925 - RNA, 21 nt, synthetic construct
  misc_feature 1..21: note = HBV-targeting guide sequence portion
  source 1..21: mol_type = other RNA
caaaacaaagagatggggtta

SEQ ID NO: 7926 - RNA, 21 nt, synthetic construct
  misc_feature 1..21: note = HBV-targeting guide sequence portion
  source 1..21: mol_type = other RNA
caaaacaagcggctaggagtt

SEQ ID NO: 7927 - RNA, 21 nt, synthetic construct
  misc_feature 1..21: note = HBV-targeting guide sequence portion
  source 1..21: mol_type = other RNA
caaaacccagaagacccacaa

SEQ ID NO: 7928 - RNA, 21 nt, synthetic construct
  misc_feature 1..21: note = HBV-targeting guide sequence portion
  source 1..21: mol_type = other RNA
caaaaccttcggatggaaact

SEQ ID NO: 7929 - RNA, 21 nt, synthetic construct
  misc_feature 1..21: note = HBV-targeting guide sequence portion
  source 1..21: mol_type = other RNA
caaaagaaaattggtaacagc

SEQ ID NO: 7930 - RNA, 21 nt, synthetic construct
  misc_feature 1..21: note = HBV-targeting guide sequence portion
  source 1..21: mol_type = other RNA
caaaagacaccaaatactcta

SEQ ID NO: 7931 - RNA, 21 nt, synthetic construct
  misc_feature 1..21: note = HBV-targeting guide sequence portion
  source 1..21: mol_type = other RNA
caaaaggcctccgtgcggtgg

SEQ ID NO: 7932 - RNA, 21 nt, synthetic construct
  misc_feature 1..21: note = HBV-targeting guide sequence portion
  source 1..21: mol_type = other RNA
caaaagtaagacaagaaatgt

SEQ ID NO: 7933 - RNA, 21 nt, synthetic construct
  misc_feature 1..21: note = HBV-targeting guide sequence portion
  source 1..21: mol_type = other RNA
caaaatcaaagaatgtttcag

SEQ ID NO: 7934 - RNA, 21 nt, synthetic construct
  misc_feature 1..21: note = HBV-targeting guide sequence portion
  source 1..21: mol_type = other RNA
caaaatcacatcatacacaaa

SEQ ID NO: 7935 - RNA, 21 nt, synthetic construct
  misc_feature 1..21: note = HBV-targeting guide sequence portion
  source 1..21: mol_type = other RNA
caaaattcgcagtccccaacc

SEQ ID NO: 7936 - RNA, 21 nt, synthetic construct
  misc_feature 1..21: note = HBV-targeting guide sequence portion
  source 1..21: mol_type = other RNA
caaacacttggcacagacctg

SEQ ID NO: 7937 - RNA, 21 nt, synthetic construct
  misc_feature 1..21: note = HBV-targeting guide sequence portion
  source 1..21: mol_type = other RNA
caaacagtctttgaagtatgc

SEQ ID NO: 7938 - RNA, 21 nt, synthetic construct
  misc_feature 1..21: note = HBV-targeting guide sequence portion
  source 1..21: mol_type = other RNA
caaacagtgggggaaagccct

SEQ ID NO: 7939 - RNA, 21 nt, synthetic construct
  misc_feature 1..21: note = HBV-targeting guide sequence portion
  source 1..21: mol_type = other RNA
caaacattctcgggactgaca

SEQ ID NO: 7940 - RNA, 21 nt, synthetic construct
  misc_feature 1..21: note = HBV-targeting guide sequence portion
  source 1..21: mol_type = other RNA
caaaccttgccagcaaatccg

SEQ ID NO: 7941 - RNA, 21 nt, synthetic construct
  misc_feature 1..21: note = HBV-targeting guide sequence portion
  source 1..21: mol_type = other RNA
caaactagacactatttacac

SEQ ID NO: 7942 - RNA, 21 nt, synthetic construct
  misc_feature 1..21: note = HBV-targeting guide sequence portion
  source 1..21: mol_type = other RNA
caaactccaacaatccagatt

SEQ ID NO: 7943 - RNA, 21 nt, synthetic construct
  misc_feature 1..21: note = HBV-targeting guide sequence portion
  source 1..21: mol_type = other RNA
caaactctgcaagatcccaga

SEQ ID NO: 7944 - RNA, 21 nt, synthetic construct
  misc_feature 1..21: note = HBV-targeting guide sequence portion
  source 1..21: mol_type = other RNA
caaactgttcacattttttga

SEQ ID NO: 7945 - RNA, 21 nt, synthetic construct
  misc_feature 1..21: note = HBV-targeting guide sequence portion
  source 1..21: mol_type = other RNA
caaagaatgtttcagaaaact

SEQ ID NO: 7946 - RNA, 21 nt, synthetic construct
  misc_feature 1..21: note = HBV-targeting guide sequence portion
  source 1..21: mol_type = other RNA
caaagaattgcttgcctgagt

SEQ ID NO: 7947 - RNA, 21 nt, synthetic construct
  misc_feature 1..21: note = HBV-targeting guide sequence portion
  source 1..21: mol_type = other RNA
caaagacaaaagaaaattggt

SEQ ID NO: 7948 - RNA, 21 nt, synthetic construct
  misc_feature 1..21: note = HBV-targeting guide sequence portion
  source 1..21: mol_type = other RNA
caaagactgtttgtttaaaga

SEQ ID NO: 7949 - RNA, 21 nt, synthetic construct
  misc_feature 1..21: note = HBV-targeting guide sequence portion
  source 1..21: mol_type = other RNA
caaagagatggggttattctc

SEQ ID NO: 7950 - RNA, 21 nt, synthetic construct
  misc_feature 1..21: note = HBV-targeting guide sequence portion
  source 1..21: mol_type = other RNA
caaagatcattaatctaatct

SEQ ID NO: 7951 - RNA, 21 nt, synthetic construct
  misc_feature 1..21: note = HBV-targeting guide sequence portion
  source 1..21: mol_type = other RNA
caaaggacgtcccgcgcagga

SEQ ID NO: 7952 - RNA, 21 nt, synthetic construct
  misc_feature 1..21: note = HBV-targeting guide sequence portion
  source 1..21: mol_type = other RNA
caaatactctaggaccgtttc

SEQ ID NO: 7953 - RNA, 21 nt, synthetic construct
  misc_feature 1..21: note = HBV-targeting guide sequence portion
  source 1..21: mol_type = other RNA
caaatacttgcccttggataa

SEQ ID NO: 7954 - RNA, 21 nt, synthetic construct
  misc_feature 1..21: note = HBV-targeting guide sequence portion
  source 1..21: mol_type = other RNA
caaatatacatcgttcccatg

SEQ ID NO: 7955 - RNA, 21 nt, synthetic construct
  misc_feature 1..21: note = HBV-targeting guide sequence portion
  source 1..21: mol_type = other RNA
caaatccgcctcctgcctcta

SEQ ID NO: 7956 - RNA, 21 nt, synthetic construct
  misc_feature 1..21: note = HBV-targeting guide sequence portion
  source 1..21: mol_type = other RNA
caaatgcccctatcctatcaa

SEQ ID NO: 7957 - RNA, 21 nt, synthetic construct
  misc_feature 1..21: note = HBV-targeting guide sequence portion
  source 1..21: mol_type = other RNA
caaatggcactagtaaactga

SEQ ID NO: 7958 - RNA, 21 nt, synthetic construct
  misc_feature 1..21: note = HBV-targeting guide sequence portion
  source 1..21: mol_type = other RNA
caaattctttatatgggtcaa

SEQ ID NO: 7959 - RNA, 21 nt, synthetic construct
  misc_feature 1..21: note = HBV-targeting guide sequence portion
  source 1..21: mol_type = other RNA
caacaagaagatgaggcatag

SEQ ID NO: 7960 - RNA, 21 nt, synthetic construct
  misc_feature 1..21: note = HBV-targeting guide sequence portion
  source 1..21: mol_type = other RNA
caacaaggaaaaccccgcctg

SEQ ID NO: 7961 - RNA, 21 nt, synthetic construct
  misc_feature 1..21: note = HBV-targeting guide sequence portion
  source 1..21: mol_type = other RNA
caacaaggatccctggccaga

SEQ ID NO: 7962 - RNA, 21 nt, synthetic construct
  misc_feature 1..21: note = HBV-targeting guide sequence portion
  source 1..21: mol_type = other RNA
caacaaggtaggagctggagc

SEQ ID NO: 7963 - RNA, 21 nt, synthetic construct
  misc_feature 1..21: note = HBV-targeting guide sequence portion
  source 1..21: mol_type = other RNA
caacaatcaatgacatagccc

SEQ ID NO: 7964 - RNA, 21 nt, synthetic construct
  misc_feature 1..21: note = HBV-targeting guide sequence portion
  source 1..21: mol_type = other RNA
caacaatccagattgggactt

SEQ ID NO: 7965 - RNA, 21 nt, synthetic construct
  misc_feature 1..21: note = HBV-targeting guide sequence portion
  source 1..21: mol_type = other RNA
caacacaagtctccggaagtg

SEQ ID NO: 7966 - RNA, 21 nt, synthetic construct
  misc_feature 1..21: note = HBV-targeting guide sequence portion
  source 1..21: mol_type = other RNA
caacacatagcgcctcattct

SEQ ID NO: 7967 - RNA, 21 nt, synthetic construct
  misc_feature 1..21: note = HBV-targeting guide sequence portion
  source 1..21: mol_type = other RNA
caacactcatatgggcctaaa

SEQ ID NO: 7968 - RNA, 21 nt, synthetic construct
  misc_feature 1..21: note = HBV-targeting guide sequence portion
  source 1..21: mol_type = other RNA
caacacttccggagacttgtg

SEQ ID NO: 7969 - RNA, 21 nt, synthetic construct
  misc_feature 1..21: note = HBV-targeting guide sequence portion
  source 1..21: mol_type = other RNA
caacagagttgtcagtcccga

SEQ ID NO: 7970 - RNA, 21 nt, synthetic construct
  misc_feature 1..21: note = HBV-targeting guide sequence portion
  source 1..21: mol_type = other RNA
caacaggagggatacatagag

SEQ ID NO: 7971 - RNA, 21 nt, synthetic construct
  misc_feature 1..21: note = HBV-targeting guide sequence portion
  source 1..21: mol_type = other RNA
caaccaccagcacgggaccct

SEQ ID NO: 7972 - RNA, 21 nt, synthetic construct
  misc_feature 1..21: note = HBV-targeting guide sequence portion
  source 1..21: mol_type = other RNA
caaccagtgggggttgcatca

SEQ ID NO: 7973 - RNA, 21 nt, synthetic construct
  misc_feature 1..21: note = HBV-targeting guide sequence portion
  source 1..21: mol_type = other RNA
caacccccactggttggggct

SEQ ID NO: 7974 - RNA, 21 nt, synthetic construct
  misc_feature 1..21: note = HBV-targeting guide sequence portion
  source 1..21: mol_type = other RNA
caaccgtcttttctcattaac

SEQ ID NO: 7975 - RNA, 21 nt, synthetic construct
  misc_feature 1..21: note = HBV-targeting guide sequence portion
  source 1..21: mol_type = other RNA
caacctccaatcactcaccaa

SEQ ID NO: 7976 - RNA, 21 nt, synthetic construct
  misc_feature 1..21: note = HBV-targeting guide sequence portion
  source 1..21: mol_type = other RNA
caacctcctgtcctccaactt

SEQ ID NO: 7977 - RNA, 21 nt, synthetic construct
  misc_feature 1..21: note = HBV-targeting guide sequence portion
  source 1..21: mol_type = other RNA
caaccttccaccaaactctgc

SEQ ID NO: 7978 - RNA, 21 nt, synthetic construct
  misc_feature 1..21: note = HBV-targeting guide sequence portion
  source 1..21: mol_type = other RNA
caacgaattgtgggtcttctg

SEQ ID NO: 7979 - RNA, 21 nt, synthetic construct
  misc_feature 1..21: note = HBV-targeting guide sequence portion
  source 1..21: mol_type = other RNA
caacgaccgaccttgaggcat

SEQ ID NO: 7980 - RNA, 21 nt, synthetic construct
  misc_feature 1..21: note = HBV-targeting guide sequence portion
  source 1..21: mol_type = other RNA
caacggccaggtctgtgccaa

SEQ ID NO: 7981 - RNA, 21 nt, synthetic construct
  misc_feature 1..21: note = HBV-targeting guide sequence portion
  source 1..21: mol_type = other RNA
caacggggtaaaggttcaggt

SEQ ID NO: 7982 - RNA, 21 nt, synthetic construct
  misc_feature 1..21: note = HBV-targeting guide sequence portion
  source 1..21: mol_type = other RNA
caactattgtggtttcacatt

SEQ ID NO: 7983 - RNA, 21 nt, synthetic construct
  misc_feature 1..21: note = HBV-targeting guide sequence portion
  source 1..21: mol_type = other RNA
caactcctcccagtctttaaa

SEQ ID NO: 7984 - RNA, 21 nt, synthetic construct
  misc_feature 1..21: note = HBV-targeting guide sequence portion
  source 1..21: mol_type = other RNA
caactctgttgtcctctcccg

SEQ ID NO: 7985 - RNA, 21 nt, synthetic construct
  misc_feature 1..21: note = HBV-targeting guide sequence portion
  source 1..21: mol_type = other RNA
caactggatcctgcgcgggac

SEQ ID NO: 7986 - RNA, 21 nt, synthetic construct
  misc_feature 1..21: note = HBV-targeting guide sequence portion
  source 1..21: mol_type = other RNA
caactggtggtcgggaaagaa

SEQ ID NO: 7987 - RNA, 21 nt, synthetic construct
  misc_feature 1..21: note = HBV-targeting guide sequence portion
  source 1..21: mol_type = other RNA
caacttacaaggcctttctgt

SEQ ID NO: 7988 - RNA, 21 nt, synthetic construct
  misc_feature 1..21: note = HBV-targeting guide sequence portion
  source 1..21: mol_type = other RNA
caacttgtcctggttatcgct

SEQ ID NO: 7989 - RNA, 21 nt, synthetic construct
  misc_feature 1..21: note = HBV-targeting guide sequence portion
  source 1..21: mol_type = other RNA
caactttttcacctctgccta

SEQ ID NO: 7990 - RNA, 21 nt, synthetic construct
  misc_feature 1..21: note = HBV-targeting guide sequence portion
  source 1..21: mol_type = other RNA
caagaaatgtgaaaccacaat

SEQ ID NO: 7991 - RNA, 21 nt, synthetic construct
  misc_feature 1..21: note = HBV-targeting guide sequence portion
  source 1..21: mol_type = other RNA
caagaagatgaggcatagcag

SEQ ID NO: 7992 - RNA, 21 nt, synthetic construct
  misc_feature 1..21: note = HBV-targeting guide sequence portion
  source 1..21: mol_type = other RNA
caagaatatggtgacccacag

SEQ ID NO: 7993 - RNA, 21 nt, synthetic construct
  misc_feature 1..21: note = HBV-targeting guide sequence portion
  source 1..21: mol_type = other RNA
caagaatcctcacaataccgc

SEQ ID NO: 7994 - RNA, 21 nt, synthetic construct
  misc_feature 1..21: note = HBV-targeting guide sequence portion
  source 1..21: mol_type = other RNA
caagaattggtgggcgttcac

SEQ ID NO: 7995 - RNA, 21 nt, synthetic construct
  misc_feature 1..21: note = HBV-targeting guide sequence portion
  source 1..21: mol_type = other RNA
caagacacacggtagttcccc

SEQ ID NO: 7996 - RNA, 21 nt, synthetic construct
  misc_feature 1..21: note = HBV-targeting guide sequence portion
  source 1..21: mol_type = other RNA
caagagaaacgggctgaggcc

SEQ ID NO: 7997 - RNA, 21 nt, synthetic construct
  misc_feature 1..21: note = HBV-targeting guide sequence portion
  source 1..21: mol_type = other RNA
caagagatgattaggcagagg

SEQ ID NO: 7998 - RNA, 21 nt, synthetic construct
  misc_feature 1..21: note = HBV-targeting guide sequence portion
  source 1..21: mol_type = other RNA
caagagctacagcatggggca

SEQ ID NO: 7999 - RNA, 21 nt, synthetic construct
  misc_feature 1..21: note = HBV-targeting guide sequence portion
  source 1..21: mol_type = other RNA
caagagtcctcttatgtaaga

SEQ ID NO: 8000 - RNA, 21 nt, synthetic construct
  misc_feature 1..21: note = HBV-targeting guide sequence portion
  source 1..21: mol_type = other RNA
caagatattatcaaaaaatgt

SEQ ID NO: 8001 - RNA, 21 nt, synthetic construct
  misc_feature 1..21: note = HBV-targeting guide sequence portion
  source 1..21: mol_type = other RNA
caagatcccagagtgagaggc

SEQ ID NO: 8002 - RNA, 21 nt, synthetic construct
  misc_feature 1..21: note = HBV-targeting guide sequence portion
  source 1..21: mol_type = other RNA
caagatgctgtacagacttgg

SEQ ID NO: 8003 - RNA, 21 nt, synthetic construct
  misc_feature 1..21: note = HBV-targeting guide sequence portion
  source 1..21: mol_type = other RNA
caagcaattctttgctgggga

SEQ ID NO: 8004 - RNA, 21 nt, synthetic construct
  misc_feature 1..21: note = HBV-targeting guide sequence portion
  source 1..21: mol_type = other RNA
caagcatctagggacctagta

SEQ ID NO: 8005 - RNA, 21 nt, synthetic construct
  misc_feature 1..21: note = HBV-targeting guide sequence portion
  source 1..21: mol_type = other RNA
caagccccaaccagtgggggt

SEQ ID NO: 8006 - RNA, 21 nt, synthetic construct
  misc_feature 1..21: note = HBV-targeting guide sequence portion
  source 1..21: mol_type = other RNA
caagcctccaagctgtgcctt

SEQ ID NO: 8007 - RNA, 21 nt, synthetic construct
  misc_feature 1..21: note = HBV-targeting guide sequence portion
  source 1..21: mol_type = other RNA
caagcggcctcgagatgggtc

SEQ ID NO: 8008 - RNA, 21 nt, synthetic construct
  misc_feature 1..21: note = HBV-targeting guide sequence portion
  source 1..21: mol_type = other RNA
caagcggctaggagttccgca

SEQ ID NO: 8009 - RNA, 21 nt, synthetic construct
  misc_feature 1..21: note = HBV-targeting guide sequence portion
  source 1..21: mol_type = other RNA
caagctgtgccttgggtggct

SEQ ID NO: 8010 - RNA, 21 nt, synthetic construct
  misc_feature 1..21: note = HBV-targeting guide sequence portion
  source 1..21: mol_type = other RNA
caaggaaaaccccgcctgtaa

SEQ ID NO: 8011 - RNA, 21 nt, synthetic construct
  misc_feature 1..21: note = HBV-targeting guide sequence portion
  source 1..21: mol_type = other RNA
caaggaacctctatgtatccc

SEQ ID NO: 8012 - RNA, 21 nt, synthetic construct
  misc_feature 1..21: note = HBV-targeting guide sequence portion
  source 1..21: mol_type = other RNA
caaggatccctggccagacgc

SEQ ID NO: 8013 - RNA, 21 nt, synthetic construct
  misc_feature 1..21: note = HBV-targeting guide sequence portion
  source 1..21: mol_type = other RNA
caaggcacagcttggaggctt

SEQ ID NO: 8014 - RNA, 21 nt, synthetic construct
  misc_feature 1..21: note = HBV-targeting guide sequence portion
  source 1..21: mol_type = other RNA
caaggcatcccgatacagagc

SEQ ID NO: 8015 - RNA, 21 nt, synthetic construct
  misc_feature 1..21: note = HBV-targeting guide sequence portion
  source 1..21: mol_type = other RNA
caaggcctttctgtgtaaaca

SEQ ID NO: 8016 - RNA, 21 nt, synthetic construct
  misc_feature 1..21: note = HBV-targeting guide sequence portion
  source 1..21: mol_type = other RNA
caagggatactaacattgaga

SEQ ID NO: 8017 - RNA, 21 nt, synthetic construct
  misc_feature 1..21: note = HBV-targeting guide sequence portion
  source 1..21: mol_type = other RNA
caagggcaagtatttggtgaa

SEQ ID NO: 8018 - RNA, 21 nt, synthetic construct
  misc_feature 1..21: note = HBV-targeting guide sequence portion
  source 1..21: mol_type = other RNA
caagggcattaaagcaggata

SEQ ID NO: 8019 - RNA, 21 nt, synthetic construct
  misc_feature 1..21: note = HBV-targeting guide sequence portion
  source 1..21: mol_type = other RNA
caaggtaggagctggagcatt

SEQ ID NO: 8020 - RNA, 21 nt, synthetic construct
  misc_feature 1..21: note = HBV-targeting guide sequence portion
  source 1..21: mol_type = other RNA
caaggtatgtttcccgtctgt

SEQ ID NO: 8021 - RNA, 21 nt, synthetic construct
  misc_feature 1..21: note = HBV-targeting guide sequence portion
  source 1..21: mol_type = other RNA
caaggtcggtcgttgacattg

SEQ ID NO: 8022 - RNA, 21 nt, synthetic construct
  misc_feature 1..21: note = HBV-targeting guide sequence portion
  source 1..21: mol_type = other RNA
caaggtcttacataagaggac

SEQ ID NO: 8023 - RNA, 21 nt, synthetic construct
  misc_feature 1..21: note = HBV-targeting guide sequence portion
  source 1..21: mol_type = other RNA
caaggtttgcattatgccctg

SEQ ID NO: 8024 - RNA, 21 nt, synthetic construct
  misc_feature 1..21: note = HBV-targeting guide sequence portion
  source 1..21: mol_type = other RNA
caagtatttggtgaatttagg

SEQ ID NO: 8025 - RNA, 21 nt, synthetic construct
  misc_feature 1..21: note = HBV-targeting guide sequence portion
  source 1..21: mol_type = other RNA
caagtctccggaagtgttgat

SEQ ID NO: 8026 - RNA, 21 nt, synthetic construct
  misc_feature 1..21: note = HBV-targeting guide sequence portion
  source 1..21: mol_type = other RNA
caagtctgtacagcatcttga

SEQ ID NO: 8027 - RNA, 21 nt, synthetic construct
  misc_feature 1..21: note = HBV-targeting guide sequence portion
  source 1..21: mol_type = other RNA
caagtgtttgctgatgcaacc

SEQ ID NO: 8028 - RNA, 21 nt, synthetic construct
  misc_feature 1..21: note = HBV-targeting guide sequence portion
  source 1..21: mol_type = other RNA
caagttggaggacaggaggtt

SEQ ID NO: 8029 - RNA, 21 nt, synthetic construct
  misc_feature 1..21: note = HBV-targeting guide sequence portion
  source 1..21: mol_type = other RNA
caataccacatcatccatata

SEQ ID NO: 8030 - RNA, 21 nt, synthetic construct
  misc_feature 1..21: note = HBV-targeting guide sequence portion
  source 1..21: mol_type = other RNA
caataccgcagagtctagact

SEQ ID NO: 8031 - RNA, 21 nt, synthetic construct
  misc_feature 1..21: note = HBV-targeting guide sequence portion
  source 1..21: mol_type = other RNA
caatacctgaacctttacccc

SEQ ID NO: 8032 - RNA, 21 nt, synthetic construct
  misc_feature 1..21: note = HBV-targeting guide sequence portion
  source 1..21: mol_type = other RNA
caataggcctgttaaccggga

SEQ ID NO: 8033 - RNA, 21 nt, synthetic construct
  misc_feature 1..21: note = HBV-targeting guide sequence portion
  source 1..21: mol_type = other RNA
caatagttgtctgaactttag

SEQ ID NO: 8034 - RNA, 21 nt, synthetic construct
  misc_feature 1..21: note = HBV-targeting guide sequence portion
  source 1..21: mol_type = other RNA
caatcaataggcctgttaacc

SEQ ID NO: 8035 - RNA, 21 nt, synthetic construct
  misc_feature 1..21: note = HBV-targeting guide sequence portion
  source 1..21: mol_type = other RNA
caatcaatgacatagcccatg

SEQ ID NO: 8036 - RNA, 21 nt, synthetic construct
  misc_feature 1..21: note = HBV-targeting guide sequence portion
  source 1..21: mol_type = other RNA
caatcactcaccaacctcctg

SEQ ID NO: 8037 - RNA, 21 nt, synthetic construct
  misc_feature 1..21: note = HBV-targeting guide sequence portion
  source 1..21: mol_type = other RNA
caatccagattgggacttcaa

SEQ ID NO: 8038 - RNA, 21 nt, synthetic construct
  misc_feature 1..21: note = HBV-targeting guide sequence portion
  source 1..21: mol_type = other RNA
caatcccaacaaggatccctg

SEQ ID NO: 8039 - RNA, 21 nt, synthetic construct
  misc_feature 1..21: note = HBV-targeting guide sequence portion
  source 1..21: mol_type = other RNA
caatcctcgagaagattgacg

SEQ ID NO: 8040 - RNA, 21 nt, synthetic construct
  misc_feature 1..21: note = HBV-targeting guide sequence portion
  source 1..21: mol_type = other RNA
caatcctctgggattctttcc

SEQ ID NO: 8041 - RNA, 21 nt, synthetic construct
  misc_feature 1..21: note = HBV-targeting guide sequence portion
  source 1..21: mol_type = other RNA
caatcgccagtcaggacggca

SEQ ID NO: 8042 - RNA, 21 nt, synthetic construct
  misc_feature 1..21: note = HBV-targeting guide sequence portion
  source 1..21: mol_type = other RNA
caatcgccgcgtcgcagaaga

SEQ ID NO: 8043 - RNA, 21 nt, synthetic construct
  misc_feature 1..21: note = HBV-targeting guide sequence portion
  source 1..21: mol_type = other RNA
caatctaagcaggctttcact

SEQ ID NO: 8044 - RNA, 21 nt, synthetic construct
  misc_feature 1..21: note = HBV-targeting guide sequence portion
  source 1..21: mol_type = other RNA
caatctcggggatctcaatgt

SEQ ID NO: 8045 - RNA, 21 nt, synthetic construct
  misc_feature 1..21: note = HBV-targeting guide sequence portion
  source 1..21: mol_type = other RNA
caatctggattgttggagttt

SEQ ID NO: 8046 - RNA, 21 nt, synthetic construct
  misc_feature 1..21: note = HBV-targeting guide sequence portion
  source 1..21: mol_type = other RNA
caatcttctcgaggattgggg

SEQ ID NO: 8047 - RNA, 21 nt, synthetic construct
  misc_feature 1..21: note = HBV-targeting guide sequence portion
  source 1..21: mol_type = other RNA
caatgacatagcccatgaaat

SEQ ID NO: 8048 - RNA, 21 nt, synthetic construct
  misc_feature 1..21: note = HBV-targeting guide sequence portion
  source 1..21: mol_type = other RNA
caatgagggttaaagacaggt

SEQ ID NO: 8049 - RNA, 21 nt, synthetic construct
  misc_feature 1..21: note = HBV-targeting guide sequence portion
  source 1..21: mol_type = other RNA
caatgatccccaacaatcaat

SEQ ID NO: 8050 - RNA, 21 nt, synthetic construct
  misc_feature 1..21: note = HBV-targeting guide sequence portion
  source 1..21: mol_type = other RNA
caatgctcaggagactccaag

SEQ ID NO: 8051 - RNA, 21 nt, synthetic construct
  misc_feature 1..21: note = HBV-targeting guide sequence portion
  source 1..21: mol_type = other RNA
caatgtcaacgaccgaccttg

SEQ ID NO: 8052 - RNA, 21 nt, synthetic construct
  misc_feature 1..21: note = HBV-targeting guide sequence portion
  source 1..21: mol_type = other RNA
caatgtccatgccctaaagcc

SEQ ID NO: 8053 - RNA, 21 nt, synthetic construct
  misc_feature 1..21: note = HBV-targeting guide sequence portion
  source 1..21: mol_type = other RNA
caatgtggttatcctgcttta

SEQ ID NO: 8054 - RNA, 21 nt, synthetic construct
  misc_feature 1..21: note = HBV-targeting guide sequence portion
  source 1..21: mol_type = other RNA
caatgttagtatcccttggac

SEQ ID NO: 8055 - RNA, 21 nt, synthetic construct
  misc_feature 1..21: note = HBV-targeting guide sequence portion
  source 1..21: mol_type = other RNA
caattcgttgacacactttcc

SEQ ID NO: 8056 - RNA, 21 nt, synthetic construct
  misc_feature 1..21: note = HBV-targeting guide sequence portion
  source 1..21: mol_type = other RNA
caattcttgcccaaggtctta

SEQ ID NO: 8057 - RNA, 21 nt, synthetic construct
  misc_feature 1..21: note = HBV-targeting guide sequence portion
  source 1..21: mol_type = other RNA
caattctttgctggggagaac

SEQ ID NO: 8058 - RNA, 21 nt, synthetic construct
  misc_feature 1..21: note = HBV-targeting guide sequence portion
  source 1..21: mol_type = other RNA
caatttatgcctacagcctcc

SEQ ID NO: 8059 - RNA, 21 nt, synthetic construct
  misc_feature 1..21: note = HBV-targeting guide sequence portion
  source 1..21: mol_type = other RNA
caatttcaaccgtcttttctc

SEQ ID NO: 8060 - RNA, 21 nt, synthetic construct
  misc_feature 1..21: note = HBV-targeting guide sequence portion
  source 1..21: mol_type = other RNA
caattttctagggggaactac

SEQ ID NO: 8061 - RNA, 21 nt, synthetic construct
  misc_feature 1..21: note = HBV-targeting guide sequence portion
  source 1..21: mol_type = other RNA
caattttcttttgtctttggg

SEQ ID NO: 8062 - RNA, 21 nt, synthetic construct
  misc_feature 1..21: note = HBV-targeting guide sequence portion
  source 1..21: mol_type = other RNA
cacaaaatcaaagaatgtttc

SEQ ID NO: 8063 - RNA, 21 nt, synthetic construct
  misc_feature 1..21: note = HBV-targeting guide sequence portion
  source 1..21: mol_type = other RNA
cacaaaatcacatcatacaca

SEQ ID NO: 8064 - RNA, 21 nt, synthetic construct
  misc_feature 1..21: note = HBV-targeting guide sequence portion
  source 1..21: mol_type = other RNA
cacaaccttccaccaaactct

SEQ ID NO: 8065 - RNA, 21 nt, synthetic construct
  misc_feature 1..21: note = HBV-targeting guide sequence portion
  source 1..21: mol_type = other RNA
cacaagtctccggaagtgttg

SEQ ID NO: 8066 - RNA, 21 nt, synthetic construct
  misc_feature 1..21: note = HBV-targeting guide sequence portion
  source 1..21: mol_type = other RNA
cacaataccgcagagtctaga

SEQ ID NO: 8067 - RNA, 21 nt, synthetic construct
  misc_feature 1..21: note = HBV-targeting guide sequence portion
  source 1..21: mol_type = other RNA
cacaatagttgtctgaacttt

SEQ ID NO: 8068 - RNA, 21 nt, synthetic construct
  misc_feature 1..21: note = HBV-targeting guide sequence portion
  source 1..21: mol_type = other RNA
cacaatgtggttatcctgctt

SEQ ID NO: 8069 - RNA, 21 nt, synthetic construct
  misc_feature 1..21: note = HBV-targeting guide sequence portion
  source 1..21: mol_type = other RNA
cacaattcgttgacacacttt

SEQ ID NO: 8070 - RNA, 21 nt, synthetic construct
  misc_feature 1..21: note = HBV-targeting guide sequence portion
  source 1..21: mol_type = other RNA
cacacggtagttccccctaga

SEQ ID NO: 8071 - RNA, 21 nt, synthetic construct
  misc_feature 1..21: note = HBV-targeting guide sequence portion
  source 1..21: mol_type = other RNA
cacacggtccggcagatgaga

SEQ ID NO: 8072 - RNA, 21 nt, synthetic construct
  misc_feature 1..21: note = HBV-targeting guide sequence portion
  source 1..21: mol_type = other RNA
cacactccaaaagacaccaaa

SEQ ID NO: 8073 - RNA, 21 nt, synthetic construct
  misc_feature 1..21: note = HBV-targeting guide sequence portion
  source 1..21: mol_type = other RNA
cacactctatggaaggcgggt

SEQ ID NO: 8074 - RNA, 21 nt, synthetic construct
  misc_feature 1..21: note = HBV-targeting guide sequence portion
  source 1..21: mol_type = other RNA
cacactttccaatcaataggc

SEQ ID NO: 8075 - RNA, 21 nt, synthetic construct
  misc_feature 1..21: note = HBV-targeting guide sequence portion
  source 1..21: mol_type = other RNA
cacagaaaggccttgtaagtt

SEQ ID NO: 8076 - RNA, 21 nt, synthetic construct
  misc_feature 1..21: note = HBV-targeting guide sequence portion
  source 1..21: mol_type = other RNA
cacagaatgaggcgctatgtg

SEQ ID NO: 8077 - RNA, 21 nt, synthetic construct
  misc_feature 1..21: note = HBV-targeting guide sequence portion
  source 1..21: mol_type = other RNA
cacagacctggccgttgcctg

SEQ ID NO: 8078 - RNA, 21 nt, synthetic construct
  misc_feature 1..21: note = HBV-targeting guide sequence portion
  source 1..21: mol_type = other RNA
cacagacggggagtccgcgta

SEQ ID NO: 8079 - RNA, 21 nt, synthetic construct
  misc_feature 1..21: note = HBV-targeting guide sequence portion
  source 1..21: mol_type = other RNA
cacagcctagcagccatggga

SEQ ID NO: 8080 - RNA, 21 nt, synthetic construct
  misc_feature 1..21: note = HBV-targeting guide sequence portion
  source 1..21: mol_type = other RNA
cacagcttggaggcttgaaca

SEQ ID NO: 8081 - RNA, 21 nt, synthetic construct
  misc_feature 1..21: note = HBV-targeting guide sequence portion
  source 1..21: mol_type = other RNA
cacagtagctccaaattcttt

SEQ ID NO: 8082 - RNA, 21 nt, synthetic construct
  misc_feature 1..21: note = HBV-targeting guide sequence portion
  source 1..21: mol_type = other RNA
cacatagcgcctcattctgtg

SEQ ID NO: 8083 - RNA, 21 nt, synthetic construct
  misc_feature 1..21: note = HBV-targeting guide sequence portion
  source 1..21: mol_type = other RNA
cacatatcgtcaatcttctcg

SEQ ID NO: 8084 - RNA, 21 nt, synthetic construct
  misc_feature 1..21: note = HBV-targeting guide sequence portion
  source 1..21: mol_type = other RNA
cacatcaggattcctaggacc

SEQ ID NO: 8085 - RNA, 21 nt, synthetic construct
  misc_feature 1..21: note = HBV-targeting guide sequence portion
  source 1..21: mol_type = other RNA
cacatcatacacaaaatcaaa

SEQ ID NO: 8086 - RNA, 21 nt, synthetic construct
  misc_feature 1..21: note = HBV-targeting guide sequence portion
  source 1..21: mol_type = other RNA
cacatcatccatataactgaa

SEQ ID NO: 8087 - RNA, 21 nt, synthetic construct
  misc_feature 1..21: note = HBV-targeting guide sequence portion
  source 1..21: mol_type = other RNA
cacatccagcgataaccagga

SEQ ID NO: 8088 - RNA, 21 nt, synthetic construct
  misc_feature 1..21: note = HBV-targeting guide sequence portion
  source 1..21: mol_type = other RNA
cacattgtgtaaaaggggcag

SEQ ID NO: 8089 - RNA, 21 nt, synthetic construct
  misc_feature 1..21: note = HBV-targeting guide sequence portion
  source 1..21: mol_type = other RNA
cacatttcttgtcttactttt

SEQ ID NO: 8090 - RNA, 21 nt, synthetic construct
  misc_feature 1..21: note = HBV-targeting guide sequence portion
  source 1..21: mol_type = other RNA
cacattttttgataatatctt

SEQ ID NO: 8091 - RNA, 21 nt, synthetic construct
  misc_feature 1..21: note = HBV-targeting guide sequence portion
  source 1..21: mol_type = other RNA
caccaaactctgcaagatccc

SEQ ID NO: 8092 - RNA, 21 nt, synthetic construct
  misc_feature 1..21: note = HBV-targeting guide sequence portion
  source 1..21: mol_type = other RNA
caccaaatactctaggaccgt

SEQ ID NO: 8093 - RNA, 21 nt, synthetic construct
  misc_feature 1..21: note = HBV-targeting guide sequence portion
  source 1..21: mol_type = other RNA
caccaaatacttgcccttgga

SEQ ID NO: 8094 - RNA, 21 nt, synthetic construct
  misc_feature 1..21: note = HBV-targeting guide sequence portion
  source 1..21: mol_type = other RNA
caccaaatgcccctatcctat

SEQ ID NO: 8095 - RNA, 21 nt, synthetic construct
  misc_feature 1..21: note = HBV-targeting guide sequence portion
  source 1..21: mol_type = other RNA
caccaacctcctgtcctccaa

SEQ ID NO: 8096 - RNA, 21 nt, synthetic construct
  misc_feature 1..21: note = HBV-targeting guide sequence portion
  source 1..21: mol_type = other RNA
caccaagatattatcaaaaaa

SEQ ID NO: 8097 - RNA, 21 nt, synthetic construct
  misc_feature 1..21: note = HBV-targeting guide sequence portion
  source 1..21: mol_type = other RNA
caccaattcttgcccaaggtc

SEQ ID NO: 8098 - RNA, 21 nt, synthetic construct
  misc_feature 1..21: note = HBV-targeting guide sequence portion
  source 1..21: mol_type = other RNA
caccacgagtctagactctgc

SEQ ID NO: 8099 - RNA, 21 nt, synthetic construct
  misc_feature 1..21: note = HBV-targeting guide sequence portion
  source 1..21: mol_type = other RNA
caccagcaatcctctgggatt

SEQ ID NO: 8100 - RNA, 21 nt, synthetic construct
  misc_feature 1..21: note = HBV-targeting guide sequence portion
  source 1..21: mol_type = other RNA
caccagcaccatgcaactttt

SEQ ID NO: 8101 - RNA, 21 nt, synthetic construct
  misc_feature 1..21: note = HBV-targeting guide sequence portion
  source 1..21: mol_type = other RNA
caccagcacgggaccctgcag

SEQ ID NO: 8102 - RNA, 21 nt, synthetic construct
  misc_feature 1..21: note = HBV-targeting guide sequence portion
  source 1..21: mol_type = other RNA
caccagcagggagatacaggc

SEQ ID NO: 8103 - RNA, 21 nt, synthetic construct
  misc_feature 1..21: note = HBV-targeting guide sequence portion
  source 1..21: mol_type = other RNA
caccagttggacccagccttc

SEQ ID NO: 8104 - RNA, 21 nt, synthetic construct
  misc_feature 1..21: note = HBV-targeting guide sequence portion
  source 1..21: mol_type = other RNA
caccatactgcactcaggcaa

SEQ ID NO: 8105 - RNA, 21 nt, synthetic construct
  misc_feature 1..21: note = HBV-targeting guide sequence portion
  source 1..21: mol_type = other RNA
caccatattcttgggaacaag

SEQ ID NO: 8106 - RNA, 21 nt, synthetic construct
  misc_feature 1..21: note = HBV-targeting guide sequence portion
  source 1..21: mol_type = other RNA
caccatgcaactttttcacct

SEQ ID NO: 8107 - RNA, 21 nt, synthetic construct
  misc_feature 1..21: note = HBV-targeting guide sequence portion
  source 1..21: mol_type = other RNA
cacccaaagacaaaagaaaat

SEQ ID NO: 8108 - RNA, 21 nt, synthetic construct
  misc_feature 1..21: note = HBV-targeting guide sequence portion
  source 1..21: mol_type = other RNA
cacccaaggcacagcttggag

SEQ ID NO: 8109 - RNA, 21 nt, synthetic construct
  misc_feature 1..21: note = HBV-targeting guide sequence portion
  source 1..21: mol_type = other RNA
cacccaggtagctagagtcat

SEQ ID NO: 8110 - RNA, 21 nt, synthetic construct
  misc_feature 1..21: note = HBV-targeting guide sequence portion
  source 1..21: mol_type = other RNA
caccccaaaaggcctccgtgc

SEQ ID NO: 8111 - RNA, 21 nt, synthetic construct
  misc_feature 1..21: note = HBV-targeting guide sequence portion
  source 1..21: mol_type = other RNA
caccccaccgcacggaggcct

SEQ ID NO: 8112 - RNA, 21 nt, synthetic construct
  misc_feature 1..21: note = HBV-targeting guide sequence portion
  source 1..21: mol_type = other RNA
cacccgccttccatagagtgt

SEQ ID NO: 8113 - RNA, 21 nt, synthetic construct
  misc_feature 1..21: note = HBV-targeting guide sequence portion
  source 1..21: mol_type = other RNA
caccctcttttcctaatatac

SEQ ID NO: 8114 - RNA, 21 nt, synthetic construct
  misc_feature 1..21: note = HBV-targeting guide sequence portion
  source 1..21: mol_type = other RNA
caccgcacggaggccttttgg

SEQ ID NO: 8115 - RNA, 21 nt, synthetic construct
  misc_feature 1..21: note = HBV-targeting guide sequence portion
  source 1..21: mol_type = other RNA
caccgtgaacgcccaccaatt

SEQ ID NO: 8116 - RNA, 21 nt, synthetic construct
  misc_feature 1..21: note = HBV-targeting guide sequence portion
  source 1..21: mol_type = other RNA
cacctcaccatactgcactca

SEQ ID NO: 8117 - RNA, 21 nt, synthetic construct
  misc_feature 1..21: note = HBV-targeting guide sequence portion
  source 1..21: mol_type = other RNA
cacctctctttacgcggactc

SEQ ID NO: 8118 - RNA, 21 nt, synthetic construct
  misc_feature 1..21: note = HBV-targeting guide sequence portion
  source 1..21: mol_type = other RNA
cacctctgagaaacactcatc

SEQ ID NO: 8119 - RNA, 21 nt, synthetic construct
  misc_feature 1..21: note = HBV-targeting guide sequence portion
  source 1..21: mol_type = other RNA
cacctctgcacgtcgcatgga

SEQ ID NO: 8120 - RNA, 21 nt, synthetic construct
  misc_feature 1..21: note = HBV-targeting guide sequence portion
  source 1..21: mol_type = other RNA
cacctctgcctaatcatctct

SEQ ID NO: 8121 - RNA, 21 nt, synthetic construct
  misc_feature 1..21: note = HBV-targeting guide sequence portion
  source 1..21: mol_type = other RNA
cacctgtattcccatcccatc

SEQ ID NO: 8122 - RNA, 21 nt, synthetic construct
  misc_feature 1..21: note = HBV-targeting guide sequence portion
  source 1..21: mol_type = other RNA
caccttatgagtccaagggat

SEQ ID NO: 8123 - RNA, 21 nt, synthetic construct
  misc_feature 1..21: note = HBV-targeting guide sequence portion
  source 1..21: mol_type = other RNA
cacgactcctgctcaaggaac

SEQ ID NO: 8124 - RNA, 21 nt, synthetic construct
  misc_feature 1..21: note = HBV-targeting guide sequence portion
  source 1..21: mol_type = other RNA
cacgagcaggggtcctaggaa

SEQ ID NO: 8125 - RNA, 21 nt, synthetic construct
  misc_feature 1..21: note = HBV-targeting guide sequence portion
  source 1..21: mol_type = other RNA
cacgagtctagactctgcggt

SEQ ID NO: 8126 - RNA, 21 nt, synthetic construct
  misc_feature 1..21: note = HBV-targeting guide sequence portion
  source 1..21: mol_type = other RNA
cacgcatgcgctgatggccta

SEQ ID NO: 8127 - RNA, 21 nt, synthetic construct
  misc_feature 1..21: note = HBV-targeting guide sequence portion
  source 1..21: mol_type = other RNA
cacggaggccttttggggtgg

SEQ ID NO: 8128 - RNA, 21 nt, synthetic construct
  misc_feature 1..21: note = HBV-targeting guide sequence portion
  source 1..21: mol_type = other RNA
cacgggaccctgcagaacctg

SEQ ID NO: 8129 - RNA, 21 nt, synthetic construct
  misc_feature 1..21: note = HBV-targeting guide sequence portion
  source 1..21: mol_type = other RNA
cacggggcgcacctctcttta

SEQ ID NO: 8130 - RNA, 21 nt, synthetic construct
  misc_feature 1..21: note = HBV-targeting guide sequence portion
  source 1..21: mol_type = other RNA
cacggtagttccccctagaaa

SEQ ID NO: 8131 - RNA, 21 nt, synthetic construct
  misc_feature 1..21: note = HBV-targeting guide sequence portion
  source 1..21: mol_type = other RNA
cacggtccggcagatgagaag

SEQ ID NO: 8132 - RNA, 21 nt, synthetic construct
  misc_feature 1..21: note = HBV-targeting guide sequence portion
  source 1..21: mol_type = other RNA
cacggtggtctccatgcgacg

SEQ ID NO: 8133 - RNA, 21 nt, synthetic construct
  misc_feature 1..21: note = HBV-targeting guide sequence portion
  source 1..21: mol_type = other RNA
cacgtcgcatggagaccaccg

SEQ ID NO: 8134 - RNA, 21 nt, synthetic construct
  misc_feature 1..21: note = HBV-targeting guide sequence portion
  source 1..21: mol_type = other RNA
cactagtaaactgagccaaga

SEQ ID NO: 8135 - RNA, 21 nt, synthetic construct
  misc_feature 1..21: note = HBV-targeting guide sequence portion
  source 1..21: mol_type = other RNA
cactatttacacactctatgg

SEQ ID NO: 8136 - RNA, 21 nt, synthetic construct
  misc_feature 1..21: note = HBV-targeting guide sequence portion
  source 1..21: mol_type = other RNA
cactcaccaacctcctgtcct

SEQ ID NO: 8137 - RNA, 21 nt, synthetic construct
  misc_feature 1..21: note = HBV-targeting guide sequence portion
  source 1..21: mol_type = other RNA
cactcaggcaagcaattcttt

SEQ ID NO: 8138 - RNA, 21 nt, synthetic construct
  misc_feature 1..21: note = HBV-targeting guide sequence portion
  source 1..21: mol_type = other RNA
cactcatatgggcctaaagtt

SEQ ID NO: 8139 - RNA, 21 nt, synthetic construct
  misc_feature 1..21: note = HBV-targeting guide sequence portion
  source 1..21: mol_type = other RNA
cactccaaaagacaccaaata

SEQ ID NO: 8140 - RNA, 21 nt, synthetic construct
  misc_feature 1..21: note = HBV-targeting guide sequence portion
  source 1..21: mol_type = other RNA
cactcccataggaattttccg

SEQ ID NO: 8141 - RNA, 21 nt, synthetic construct
  misc_feature 1..21: note = HBV-targeting guide sequence portion
  source 1..21: mol_type = other RNA
cactcctccagcttatagacc

SEQ ID NO: 8142 - RNA, 21 nt, synthetic construct
  misc_feature 1..21: note = HBV-targeting guide sequence portion
  source 1..21: mol_type = other RNA
cactctatggaaggcgggtgt

SEQ ID NO: 8143 - RNA, 21 nt, synthetic construct
  misc_feature 1..21: note = HBV-targeting guide sequence portion
  source 1..21: mol_type = other RNA
cactctcttatataaaacacc

SEQ ID NO: 8144 - RNA, 21 nt, synthetic construct
  misc_feature 1..21: note = HBV-targeting guide sequence portion
  source 1..21: mol_type = other RNA
cactctgggatcttgcagagt

SEQ ID NO: 8145 - RNA, 21 nt, synthetic construct
  misc_feature 1..21: note = HBV-targeting guide sequence portion
  source 1..21: mol_type = other RNA
cactgaacaaatggcactagt

SEQ ID NO: 8146 - RNA, 21 nt, synthetic construct
  misc_feature 1..21: note = HBV-targeting guide sequence portion
  source 1..21: mol_type = other RNA
cactgcatggcctgaggatga

SEQ ID NO: 8147 - RNA, 21 nt, synthetic construct
  misc_feature 1..21: note = HBV-targeting guide sequence portion
  source 1..21: mol_type = other RNA
cactggttggggcttggtcat

SEQ ID NO: 8148 - RNA, 21 nt, synthetic construct
  misc_feature 1..21: note = HBV-targeting guide sequence portion
  source 1..21: mol_type = other RNA
cactgtttggctttcagttat

SEQ ID NO: 8149 - RNA, 21 nt, synthetic construct
  misc_feature 1..21: note = HBV-targeting guide sequence portion
  source 1..21: mol_type = other RNA
cacttccggagacttgtgttg

SEQ ID NO: 8150 - RNA, 21 nt, synthetic construct
  misc_feature 1..21: note = HBV-targeting guide sequence portion
  source 1..21: mol_type = other RNA
cacttcgcttcacctctgcac

SEQ ID NO: 8151 - RNA, 21 nt, synthetic construct
  misc_feature 1..21: note = HBV-targeting guide sequence portion
  source 1..21: mol_type = other RNA
cacttggcacagacctggccg

SEQ ID NO: 8152 - RNA, 21 nt, synthetic construct
  misc_feature 1..21: note = HBV-targeting guide sequence portion
  source 1..21: mol_type = other RNA
cactttccaatcaataggcct

SEQ ID NO: 8153 - RNA, 21 nt, synthetic construct
  misc_feature 1..21: note = HBV-targeting guide sequence portion
  source 1..21: mol_type = other RNA
cactttttcgccaacttacaa

SEQ ID NO: 8154 - RNA, 21 nt, synthetic construct
  misc_feature 1..21: note = HBV-targeting guide sequence portion
  source 1..21: mol_type = other RNA
cagaaaactcccggttaacag

SEQ ID NO: 8155 - RNA, 21 nt, synthetic construct
  misc_feature 1..21: note = HBV-targeting guide sequence portion
  source 1..21: mol_type = other RNA
cagaaaggccttgtaagttgg

SEQ ID NO: 8156 - RNA, 21 nt, synthetic construct
  misc_feature 1..21: note = HBV-targeting guide sequence portion
  source 1..21: mol_type = other RNA
cagaacatctagttaatcatt

SEQ ID NO: 8157 - RNA, 21 nt, synthetic construct
  misc_feature 1..21: note = HBV-targeting guide sequence portion
  source 1..21: mol_type = other RNA
cagaacctgcacgactcctgc

SEQ ID NO: 8158 - RNA, 21 nt, synthetic construct
  misc_feature 1..21: note = HBV-targeting guide sequence portion
  source 1..21: mol_type = other RNA
cagaagaaccaacaagaagat

SEQ ID NO: 8159 - RNA, 21 nt, synthetic construct
  misc_feature 1..21: note = HBV-targeting guide sequence portion
  source 1..21: mol_type = other RNA
cagaagacccacaattcgttg

SEQ ID NO: 8160 - RNA, 21 nt, synthetic construct
  misc_feature 1..21: note = HBV-targeting guide sequence portion
  source 1..21: mol_type = other RNA
cagaagatctcaatctcgggg

SEQ ID NO: 8161 - RNA, 21 nt, synthetic construct
  misc_feature 1..21: note = HBV-targeting guide sequence portion
  source 1..21: mol_type = other RNA
cagaaggcaaaaacgagagta

SEQ ID NO: 8162 - RNA, 21 nt, synthetic construct
  misc_feature 1..21: note = HBV-targeting guide sequence portion
  source 1..21: mol_type = other RNA
cagaatctttccaccagcaat

SEQ ID NO: 8163 - RNA, 21 nt, synthetic construct
  misc_feature 1..21: note = HBV-targeting guide sequence portion
  source 1..21: mol_type = other RNA
cagaatgaggcgctatgtgtt

SEQ ID NO: 8164 - RNA, 21 nt, synthetic construct
  misc_feature 1..21: note = HBV-targeting guide sequence portion
  source 1..21: mol_type = other RNA
cagacaactattgtggtttca

SEQ ID NO: 8165 - RNA, 21 nt, synthetic construct
  misc_feature 1..21: note = HBV-targeting guide sequence portion
  source 1..21: mol_type = other RNA
cagacacatccagcgataacc

SEQ ID NO: 8166 - RNA, 21 nt, synthetic construct
  misc_feature 1..21: note = HBV-targeting guide sequence portion
  source 1..21: mol_type = other RNA
cagaccaatttatgcctacag

SEQ ID NO: 8167 - RNA, 21 nt, synthetic construct
  misc_feature 1..21: note = HBV-targeting guide sequence portion
  source 1..21: mol_type = other RNA
cagaccggctgcgagcaaaac

SEQ ID NO: 8168 - RNA, 21 nt, synthetic construct
  misc_feature 1..21: note = HBV-targeting guide sequence portion
  source 1..21: mol_type = other RNA
cagacctggccgttgcctggc

SEQ ID NO: 8169 - RNA, 21 nt, synthetic construct
  misc_feature 1..21: note = HBV-targeting guide sequence portion
  source 1..21: mol_type = other RNA
cagacgaagatctcaatcgcc

SEQ ID NO: 8170 - RNA, 21 nt, synthetic construct
  misc_feature 1..21: note = HBV-targeting guide sequence portion
  source 1..21: mol_type = other RNA
cagacgccaacaaggtaggag

SEQ ID NO: 8171 - RNA, 21 nt, synthetic construct
  misc_feature 1..21: note = HBV-targeting guide sequence portion
  source 1..21: mol_type = other RNA
cagacgggaaacataccttga

SEQ ID NO: 8172 - RNA, 21 nt, synthetic construct
  misc_feature 1..21: note = HBV-targeting guide sequence portion
  source 1..21: mol_type = other RNA
cagacggggagtccgcgtaaa

SEQ ID NO: 8173 - RNA, 21 nt, synthetic construct
  misc_feature 1..21: note = HBV-targeting guide sequence portion
  source 1..21: mol_type = other RNA
cagacttggcccccaatacca

SEQ ID NO: 8174 - RNA, 21 nt, synthetic construct
  misc_feature 1..21: note = HBV-targeting guide sequence portion
  source 1..21: mol_type = other RNA
cagagaagaggacgacagggc

SEQ ID NO: 8175 - RNA, 21 nt, synthetic construct
  misc_feature 1..21: note = HBV-targeting guide sequence portion
  source 1..21: mol_type = other RNA
cagagagtccaagagtcctct

SEQ ID NO: 8176 - RNA, 21 nt, synthetic construct
  misc_feature 1..21: note = HBV-targeting guide sequence portion
  source 1..21: mol_type = other RNA
cagagcaaactccaacaatcc

SEQ ID NO: 8177 - RNA, 21 nt, synthetic construct
  misc_feature 1..21: note = HBV-targeting guide sequence portion
  source 1..21: mol_type = other RNA
cagagctgcggcggtatctag

SEQ ID NO: 8178 - RNA, 21 nt, synthetic construct
  misc_feature 1..21: note = HBV-targeting guide sequence portion
  source 1..21: mol_type = other RNA
cagaggagccggaaaggttcc

SEQ ID NO: 8179 - RNA, 21 nt, synthetic construct
  misc_feature 1..21: note = HBV-targeting guide sequence portion
  source 1..21: mol_type = other RNA
cagaggattgctggtggaaag

SEQ ID NO: 8180 - RNA, 21 nt, synthetic construct
  misc_feature 1..21: note = HBV-targeting guide sequence portion
  source 1..21: mol_type = other RNA
cagaggtgaaaaagttgcatg

SEQ ID NO: 8181 - RNA, 21 nt, synthetic construct
  misc_feature 1..21: note = HBV-targeting guide sequence portion
  source 1..21: mol_type = other RNA
cagaggtgaagcgaagtgcac

SEQ ID NO: 8182 - RNA, 21 nt, synthetic construct
  misc_feature 1..21: note = HBV-targeting guide sequence portion
  source 1..21: mol_type = other RNA
cagaggtggagacagcggggt

SEQ ID NO: 8183 - RNA, 21 nt, synthetic construct
  misc_feature 1..21: note = HBV-targeting guide sequence portion
  source 1..21: mol_type = other RNA
cagagtctagactcgtggtgg

SEQ ID NO: 8184 - RNA, 21 nt, synthetic construct
  misc_feature 1..21: note = HBV-targeting guide sequence portion
  source 1..21: mol_type = other RNA
cagagtgagaggcctgtatct

SEQ ID NO: 8185 - RNA, 21 nt, synthetic construct
  misc_feature 1..21: note = HBV-targeting guide sequence portion
  source 1..21: mol_type = other RNA
cagagttgtcagtcccgagaa

SEQ ID NO: 8186 - RNA, 21 nt, synthetic construct
  misc_feature 1..21: note = HBV-targeting guide sequence portion
  source 1..21: mol_type = other RNA
cagagtttggtggaaggttgt

SEQ ID NO: 8187 - RNA, 21 nt, synthetic construct
  misc_feature 1..21: note = HBV-targeting guide sequence portion
  source 1..21: mol_type = other RNA
cagatgagaaggcacagacgg

SEQ ID NO: 8188 - RNA, 21 nt, synthetic construct
  misc_feature 1..21: note = HBV-targeting guide sequence portion
  source 1..21: mol_type = other RNA
cagattgggacttcaatccca

SEQ ID NO: 8189 - RNA, 21 nt, synthetic construct
  misc_feature 1..21: note = HBV-targeting guide sequence portion
  source 1..21: mol_type = other RNA
cagcaaaacccagaagaccca

SEQ ID NO: 8190 - RNA, 21 nt, synthetic construct
  misc_feature 1..21: note = HBV-targeting guide sequence portion
  source 1..21: mol_type = other RNA
cagcaaacacttggcacagac

SEQ ID NO: 8191 - RNA, 21 nt, synthetic construct
  misc_feature 1..21: note = HBV-targeting guide sequence portion
  source 1..21: mol_type = other RNA
cagcaaagaattgcttgcctg

SEQ ID NO: 8192 - RNA, 21 nt, synthetic construct
  misc_feature 1..21: note = HBV-targeting guide sequence portion
  source 1..21: mol_type = other RNA
cagcaaatccgcctcctgcct

SEQ ID NO: 8193 - RNA, 21 nt, synthetic construct
  misc_feature 1..21: note = HBV-targeting guide sequence portion
  source 1..21: mol_type = other RNA
cagcaacaggagggatacata

SEQ ID NO: 8194 - RNA, 21 nt, synthetic construct
  misc_feature 1..21: note = HBV-targeting guide sequence portion
  source 1..21: mol_type = other RNA
cagcaatcctctgggattctt

SEQ ID NO: 8195 - RNA, 21 nt, synthetic construct
  misc_feature 1..21: note = HBV-targeting guide sequence portion
  source 1..21: mol_type = other RNA
cagcacagcctagcagccatg

SEQ ID NO: 8196 - RNA, 21 nt, synthetic construct
  misc_feature 1..21: note = HBV-targeting guide sequence portion
  source 1..21: mol_type = other RNA
cagcaccatgcaactttttca

SEQ ID NO: 8197 - RNA, 21 nt, synthetic construct
  misc_feature 1..21: note = HBV-targeting guide sequence portion
  source 1..21: mol_type = other RNA
cagcacgggaccctgcagaac

SEQ ID NO: 8198 - RNA, 21 nt, synthetic construct
  misc_feature 1..21: note = HBV-targeting guide sequence portion
  source 1..21: mol_type = other RNA
cagcaggatgaagaggaagat

SEQ ID NO: 8199 - RNA, 21 nt, synthetic construct
  misc_feature 1..21: note = HBV-targeting guide sequence portion
  source 1..21: mol_type = other RNA
cagcagggagatacaggcctc

SEQ ID NO: 8200 - RNA, 21 nt, synthetic construct
  misc_feature 1..21: note = HBV-targeting guide sequence portion
  source 1..21: mol_type = other RNA
cagcatcttgagtccctttat

SEQ ID NO: 8201 - RNA, 21 nt, synthetic construct
  misc_feature 1..21: note = HBV-targeting guide sequence portion
  source 1..21: mol_type = other RNA
cagcatggggcagaatctttc

SEQ ID NO: 8202 - RNA, 21 nt, synthetic construct
  misc_feature 1..21: note = HBV-targeting guide sequence portion
  source 1..21: mol_type = other RNA
cagccatgggaacgatgtata

SEQ ID NO: 8203 - RNA, 21 nt, synthetic construct
  misc_feature 1..21: note = HBV-targeting guide sequence portion
  source 1..21: mol_type = other RNA
cagcccgtttctcttggctca

SEQ ID NO: 8204 - RNA, 21 nt, synthetic construct
  misc_feature 1..21: note = HBV-targeting guide sequence portion
  source 1..21: mol_type = other RNA
cagccggtctggagcaaacat

SEQ ID NO: 8205 - RNA, 21 nt, synthetic construct
  misc_feature 1..21: note = HBV-targeting guide sequence portion
  source 1..21: mol_type = other RNA
cagcctaccccgctgtctcca

SEQ ID NO: 8206 - RNA, 21 nt, synthetic construct
  misc_feature 1..21: note = HBV-targeting guide sequence portion
  source 1..21: mol_type = other RNA
cagcctagcagccatgggaac

SEQ ID NO: 8207 - RNA, 21 nt, synthetic construct
  misc_feature 1..21: note = HBV-targeting guide sequence portion
  source 1..21: mol_type = other RNA
cagcctcctagtacaaagatc

SEQ ID NO: 8208 - RNA, 21 nt, synthetic construct
  misc_feature 1..21: note = HBV-targeting guide sequence portion
  source 1..21: mol_type = other RNA
cagccttcagagcaaactcca

SEQ ID NO: 8209 - RNA, 21 nt, synthetic construct
  misc_feature 1..21: note = HBV-targeting guide sequence portion
  source 1..21: mol_type = other RNA
cagcgataaccaggacaagtt

SEQ ID NO: 8210 - RNA, 21 nt, synthetic construct
  misc_feature 1..21: note = HBV-targeting guide sequence portion
  source 1..21: mol_type = other RNA
cagcgcagggtccccaatcct

SEQ ID NO: 8211 - RNA, 21 nt, synthetic construct
  misc_feature 1..21: note = HBV-targeting guide sequence portion
  source 1..21: mol_type = other RNA
cagcgcatgcgtggaaccttt

SEQ ID NO: 8212 - RNA, 21 nt, synthetic construct
  misc_feature 1..21: note = HBV-targeting guide sequence portion
  source 1..21: mol_type = other RNA
cagcgccgacgggacgtaaac

SEQ ID NO: 8213 - RNA, 21 nt, synthetic construct
  misc_feature 1..21: note = HBV-targeting guide sequence portion
  source 1..21: mol_type = other RNA
cagcggggtaggctgccgtcc

SEQ ID NO: 8214 - RNA, 21 nt, synthetic construct
  misc_feature 1..21: note = HBV-targeting guide sequence portion
  source 1..21: mol_type = other RNA
cagcggtataaagggactcaa

SEQ ID NO: 8215 - RNA, 21 nt, synthetic construct
  misc_feature 1..21: note = HBV-targeting guide sequence portion
  source 1..21: mol_type = other RNA
cagctcctaccttgttggcgt

SEQ ID NO: 8216 - RNA, 21 nt, synthetic construct
  misc_feature 1..21: note = HBV-targeting guide sequence portion
  source 1..21: mol_type = other RNA
cagctctgtatcgggatgcct

SEQ ID NO: 8217 - RNA, 21 nt, synthetic construct
  misc_feature 1..21: note = HBV-targeting guide sequence portion
  source 1..21: mol_type = other RNA
cagcttatagaccaccaaatg

SEQ ID NO: 8218 - RNA, 21 nt, synthetic construct
  misc_feature 1..21: note = HBV-targeting guide sequence portion
  source 1..21: mol_type = other RNA
cagcttggaggcttgaacagt

SEQ ID NO: 8219 - RNA, 21 nt, synthetic construct
  misc_feature 1..21: note = HBV-targeting guide sequence portion
  source 1..21: mol_type = other RNA
caggaacagtaaaccctgttc

SEQ ID NO: 8220 - RNA, 21 nt, synthetic construct
  misc_feature 1..21: note = HBV-targeting guide sequence portion
  source 1..21: mol_type = other RNA
caggacaagttggaggacagg

SEQ ID NO: 8221 - RNA, 21 nt, synthetic construct
  misc_feature 1..21: note = HBV-targeting guide sequence portion
  source 1..21: mol_type = other RNA
caggacggcagcctaccccgc

SEQ ID NO: 8222 - RNA, 21 nt, synthetic construct
  misc_feature 1..21: note = HBV-targeting guide sequence portion
  source 1..21: mol_type = other RNA
caggagactccaaggcatccc

SEQ ID NO: 8223 - RNA, 21 nt, synthetic construct
  misc_feature 1..21: note = HBV-targeting guide sequence portion
  source 1..21: mol_type = other RNA
caggaggcggatttgctggca

SEQ ID NO: 8224 - RNA, 21 nt, synthetic construct
  misc_feature 1..21: note = HBV-targeting guide sequence portion
  source 1..21: mol_type = other RNA
caggagggatacatagaggtt

SEQ ID NO: 8225 - RNA, 21 nt, synthetic construct
  misc_feature 1..21: note = HBV-targeting guide sequence portion
  source 1..21: mol_type = other RNA
caggaggttggtgagtgattg

SEQ ID NO: 8226 - RNA, 21 nt, synthetic construct
  misc_feature 1..21: note = HBV-targeting guide sequence portion
  source 1..21: mol_type = other RNA
caggagtcgtgcaggttctgc

SEQ ID NO: 8227 - RNA, 21 nt, synthetic construct
  misc_feature 1..21: note = HBV-targeting guide sequence portion
  source 1..21: mol_type = other RNA
caggataaccacattgtgtaa

SEQ ID NO: 8228 - RNA, 21 nt, synthetic construct
  misc_feature 1..21: note = HBV-targeting guide sequence portion
  source 1..21: mol_type = other RNA
caggatcatcaaccaccagca

SEQ ID NO: 8229 - RNA, 21 nt, synthetic construct
  misc_feature 1..21: note = HBV-targeting guide sequence portion
  source 1..21: mol_type = other RNA
caggatccagttggcagcaca

SEQ ID NO: 8230 - RNA, 21 nt, synthetic construct
  misc_feature 1..21: note = HBV-targeting guide sequence portion
  source 1..21: mol_type = other RNA
caggatgaagaggaagatgat

SEQ ID NO: 8231 - RNA, 21 nt, synthetic construct
  misc_feature 1..21: note = HBV-targeting guide sequence portion
  source 1..21: mol_type = other RNA
caggatgatgggatgggaata

SEQ ID NO: 8232 - RNA, 21 nt, synthetic construct
  misc_feature 1..21: note = HBV-targeting guide sequence portion
  source 1..21: mol_type = other RNA
caggattcctaggacccctgc

SEQ ID NO: 8233 - RNA, 21 nt, synthetic construct
  misc_feature 1..21: note = HBV-targeting guide sequence portion
  source 1..21: mol_type = other RNA
caggcaacggccaggtctgtg

SEQ ID NO: 8234 - RNA, 21 nt, synthetic construct
  misc_feature 1..21: note = HBV-targeting guide sequence portion
  source 1..21: mol_type = other RNA
caggcaagcaattctttgctg

SEQ ID NO: 8235 - RNA, 21 nt, synthetic construct
  misc_feature 1..21: note = HBV-targeting guide sequence portion
  source 1..21: mol_type = other RNA
caggcagagaagaggacgaca

SEQ ID NO: 8236 - RNA, 21 nt, synthetic construct
  misc_feature 1..21: note = HBV-targeting guide sequence portion
  source 1..21: mol_type = other RNA
caggcataatcaatttcaacc

SEQ ID NO: 8237 - RNA, 21 nt, synthetic construct
  misc_feature 1..21: note = HBV-targeting guide sequence portion
  source 1..21: mol_type = other RNA
caggcctattgattggaaagt

SEQ ID NO: 8238 - RNA, 21 nt, synthetic construct
  misc_feature 1..21: note = HBV-targeting guide sequence portion
  source 1..21: mol_type = other RNA
caggcctctcactctgggatc

SEQ ID NO: 8239 - RNA, 21 nt, synthetic construct
  misc_feature 1..21: note = HBV-targeting guide sequence portion
  source 1..21: mol_type = other RNA
caggcggggttttccttgttg

SEQ ID NO: 8240 - RNA, 21 nt, synthetic construct
  misc_feature 1..21: note = HBV-targeting guide sequence portion
  source 1..21: mol_type = other RNA
caggctcagggcataatgcaa

SEQ ID NO: 8241 - RNA, 21 nt, synthetic construct
  misc_feature 1..21: note = HBV-targeting guide sequence portion
  source 1..21: mol_type = other RNA
caggctttcactttttcgcca

SEQ ID NO: 8242 - RNA, 21 nt, synthetic construct
  misc_feature 1..21: note = HBV-targeting guide sequence portion
  source 1..21: mol_type = other RNA
cagggagatacaggcctctca

SEQ ID NO: 8243 - RNA, 21 nt, synthetic construct
  misc_feature 1..21: note = HBV-targeting guide sequence portion
  source 1..21: mol_type = other RNA
cagggatccttgttgggattg

SEQ ID NO: 8244 - RNA, 21 nt, synthetic construct
  misc_feature 1..21: note = HBV-targeting guide sequence portion
  source 1..21: mol_type = other RNA
cagggcataatgcaaaccttg

SEQ ID NO: 8245 - RNA, 21 nt, synthetic construct
  misc_feature 1..21: note = HBV-targeting guide sequence portion
  source 1..21: mol_type = other RNA
cagggccccaagcggcctcga

SEQ ID NO: 8246 - RNA, 21 nt, synthetic construct
  misc_feature 1..21: note = HBV-targeting guide sequence portion
  source 1..21: mol_type = other RNA
caggggtcctaggaatcctga

SEQ ID NO: 8247 - RNA, 21 nt, synthetic construct
  misc_feature 1..21: note = HBV-targeting guide sequence portion
  source 1..21: mol_type = other RNA
cagggtccccaatcctcgaga

SEQ ID NO: 8248 - RNA, 21 nt, synthetic construct
  misc_feature 1..21: note = HBV-targeting guide sequence portion
  source 1..21: mol_type = other RNA
cagggtcccgtgctggtggtt

SEQ ID NO: 8249 - RNA, 21 nt, synthetic construct
  misc_feature 1..21: note = HBV-targeting guide sequence portion
  source 1..21: mol_type = other RNA
cagggtttactgttcctgaac

SEQ ID NO: 8250 - RNA, 21 nt, synthetic construct
  misc_feature 1..21: note = HBV-targeting guide sequence portion
  source 1..21: mol_type = other RNA
caggtacagtagaagaataaa

SEQ ID NO: 8251 - RNA, 21 nt, synthetic construct
  misc_feature 1..21: note = HBV-targeting guide sequence portion
  source 1..21: mol_type = other RNA
caggtagctagagtcattagt

SEQ ID NO: 8252 - RNA, 21 nt, synthetic construct
  misc_feature 1..21: note = HBV-targeting guide sequence portion
  source 1..21: mol_type = other RNA
caggtattgtttacacagaaa

SEQ ID NO: 8253 - RNA, 21 nt, synthetic construct
  misc_feature 1..21: note = HBV-targeting guide sequence portion
  source 1..21: mol_type = other RNA
caggtcccctagaagaagaac

SEQ ID NO: 8254 - RNA, 21 nt, synthetic construct
  misc_feature 1..21: note = HBV-targeting guide sequence portion
  source 1..21: mol_type = other RNA
caggtctgtgccaagtgtttg

SEQ ID NO: 8255 - RNA, 21 nt, synthetic construct
  misc_feature 1..21: note = HBV-targeting guide sequence portion
  source 1..21: mol_type = other RNA
caggtgcagtttccatccgaa

SEQ ID NO: 8256 - RNA, 21 nt, synthetic construct
  misc_feature 1..21: note = HBV-targeting guide sequence portion
  source 1..21: mol_type = other RNA
caggttctgcagggtcccgtg

SEQ ID NO: 8257 - RNA, 21 nt, synthetic construct
  misc_feature 1..21: note = HBV-targeting guide sequence portion
  source 1..21: mol_type = other RNA
cagtaaaccctgttccgacta

SEQ ID NO: 8258 - RNA, 21 nt, synthetic construct
  misc_feature 1..21: note = HBV-targeting guide sequence portion
  source 1..21: mol_type = other RNA
cagtagaagaataaagccccg

SEQ ID NO: 8259 - RNA, 21 nt, synthetic construct
  misc_feature 1..21: note = HBV-targeting guide sequence portion
  source 1..21: mol_type = other RNA
cagtagctccaaattctttat

SEQ ID NO: 8260 - RNA, 21 nt, synthetic construct
  misc_feature 1..21: note = HBV-targeting guide sequence portion
  source 1..21: mol_type = other RNA
cagtaggacatgaacaagaga

SEQ ID NO: 8261 - RNA, 21 nt, synthetic construct
  misc_feature 1..21: note = HBV-targeting guide sequence portion
  source 1..21: mol_type = other RNA
cagtagtcggaacagggttta

SEQ ID NO: 8262 - RNA, 21 nt, synthetic construct
  misc_feature 1..21: note = HBV-targeting guide sequence portion
  source 1..21: mol_type = other RNA
cagtatggatcggcagaggag

SEQ ID NO: 8263 - RNA, 21 nt, synthetic construct
  misc_feature 1..21: note = HBV-targeting guide sequence portion
  source 1..21: mol_type = other RNA
cagtatggtgaggtgaacaat

SEQ ID NO: 8264 - RNA, 21 nt, synthetic construct
  misc_feature 1..21: note = HBV-targeting guide sequence portion
  source 1..21: mol_type = other RNA
cagtcaggacggcagcctacc

SEQ ID NO: 8265 - RNA, 21 nt, synthetic construct
  misc_feature 1..21: note = HBV-targeting guide sequence portion
  source 1..21: mol_type = other RNA
cagtccccaacctccaatcac

SEQ ID NO: 8266 - RNA, 21 nt, synthetic construct
  misc_feature 1..21: note = HBV-targeting guide sequence portion
  source 1..21: mol_type = other RNA
cagtcccgagaatgtttgctc

SEQ ID NO: 8267 - RNA, 21 nt, synthetic construct
  misc_feature 1..21: note = HBV-targeting guide sequence portion
  source 1..21: mol_type = other RNA
cagtctttaaacaaacagtct

SEQ ID NO: 8268 - RNA, 21 nt, synthetic construct
  misc_feature 1..21: note = HBV-targeting guide sequence portion
  source 1..21: mol_type = other RNA
cagtctttgaagtatgcctca

SEQ ID NO: 8269 - RNA, 21 nt, synthetic construct
  misc_feature 1..21: note = HBV-targeting guide sequence portion
  source 1..21: mol_type = other RNA
cagtgggggaaagccctacga

SEQ ID NO: 8270 - RNA, 21 nt, synthetic construct
  misc_feature 1..21: note = HBV-targeting guide sequence portion
  source 1..21: mol_type = other RNA
cagtgggggttgcatcagcaa

SEQ ID NO: 8271 - RNA, 21 nt, synthetic construct
  misc_feature 1..21: note = HBV-targeting guide sequence portion
  source 1..21: mol_type = other RNA
cagtggttcgtagggctttcc

SEQ ID NO: 8272 - RNA, 21 nt, synthetic construct
  misc_feature 1..21: note = HBV-targeting guide sequence portion
  source 1..21: mol_type = other RNA
cagttaatgagaaaagacggt

SEQ ID NO: 8273 - RNA, 21 nt, synthetic construct
  misc_feature 1..21: note = HBV-targeting guide sequence portion
  source 1..21: mol_type = other RNA
cagttatatggatgatgtggt

SEQ ID NO: 8274 - RNA, 21 nt, synthetic construct
  misc_feature 1..21: note = HBV-targeting guide sequence portion
  source 1..21: mol_type = other RNA
cagttatgtcaacactcatat

SEQ ID NO: 8275 - RNA, 21 nt, synthetic construct
  misc_feature 1..21: note = HBV-targeting guide sequence portion
  source 1..21: mol_type = other RNA
cagttcaggaacagtaaaccc

SEQ ID NO: 8276 - RNA, 21 nt, synthetic construct
  misc_feature 1..21: note = HBV-targeting guide sequence portion
  source 1..21: mol_type = other RNA
cagttggacccagccttcaga

SEQ ID NO: 8277 - RNA, 21 nt, synthetic construct
  misc_feature 1..21: note = HBV-targeting guide sequence portion
  source 1..21: mol_type = other RNA
cagttggcagcacagcctagc

SEQ ID NO: 8278 - RNA, 21 nt, synthetic construct
  misc_feature 1..21: note = HBV-targeting guide sequence portion
  source 1..21: mol_type = other RNA
cagtttactagtgccatttgt

SEQ ID NO: 8279 - RNA, 21 nt, synthetic construct
  misc_feature 1..21: note = HBV-targeting guide sequence portion
  source 1..21: mol_type = other RNA
cagtttccatccgaaggtttt

SEQ ID NO: 8280 - RNA, 21 nt, synthetic construct
  misc_feature 1..21: note = HBV-targeting guide sequence portion
  source 1..21: mol_type = other RNA
cagtttgtaggcccgcttaca

SEQ ID NO: 8281 - RNA, 21 nt, synthetic construct
  misc_feature 1..21: note = HBV-targeting guide sequence portion
  source 1..21: mol_type = other RNA
cataaattggtctgcgcacca

SEQ ID NO: 8282 - RNA, 21 nt, synthetic construct
  misc_feature 1..21: note = HBV-targeting guide sequence portion
  source 1..21: mol_type = other RNA
cataactgactactaggtccc

SEQ ID NO: 8283 - RNA, 21 nt, synthetic construct
  misc_feature 1..21: note = HBV-targeting guide sequence portion
  source 1..21: mol_type = other RNA
cataagaggactcttggactc

SEQ ID NO: 8284 - RNA, 21 nt, synthetic construct
  misc_feature 1..21: note = HBV-targeting guide sequence portion
  source 1..21: mol_type = other RNA
cataaggtgggaaattttacg

SEQ ID NO: 8285 - RNA, 21 nt, synthetic construct
  misc_feature 1..21: note = HBV-targeting guide sequence portion
  source 1..21: mol_type = other RNA
cataatcaatttcaaccgtct

SEQ ID NO: 8286 - RNA, 21 nt, synthetic construct
  misc_feature 1..21: note = HBV-targeting guide sequence portion
  source 1..21: mol_type = other RNA
cataatgcaaaccttgccagc

SEQ ID NO: 8287 - RNA, 21 nt, synthetic construct
  misc_feature 1..21: note = HBV-targeting guide sequence portion
  source 1..21: mol_type = other RNA
catacaagggcattaaagcag

SEQ ID NO: 8288 - RNA, 21 nt, synthetic construct
  misc_feature 1..21: note = HBV-targeting guide sequence portion
  source 1..21: mol_type = other RNA
catacacaaaatcaaagaatg

SEQ ID NO: 8289 - RNA, 21 nt, synthetic construct
  misc_feature 1..21: note = HBV-targeting guide sequence portion
  source 1..21: mol_type = other RNA
cataccttgatagtccagaag

SEQ ID NO: 8290 - RNA, 21 nt, synthetic construct
  misc_feature 1..21: note = HBV-targeting guide sequence portion
  source 1..21: mol_type = other RNA
catactgcactcaggcaagca

SEQ ID NO: 8291 - RNA, 21 nt, synthetic construct
  misc_feature 1..21: note = HBV-targeting guide sequence portion
  source 1..21: mol_type = other RNA
catactgcggaactcctagcc

SEQ ID NO: 8292 - RNA, 21 nt, synthetic construct
  misc_feature 1..21: note = HBV-targeting guide sequence portion
  source 1..21: mol_type = other RNA
catacttcaaagactgtttgt

SEQ ID NO: 8293 - RNA, 21 nt, synthetic construct
  misc_feature 1..21: note = HBV-targeting guide sequence portion
  source 1..21: mol_type = other RNA
catagaggttccttgagcagg

SEQ ID NO: 8294 - RNA, 21 nt, synthetic construct
  misc_feature 1..21: note = HBV-targeting guide sequence portion
  source 1..21: mol_type = other RNA
catagagtgtgtaaatagtgt

SEQ ID NO: 8295 - RNA, 21 nt, synthetic construct
  misc_feature 1..21: note = HBV-targeting guide sequence portion
  source 1..21: mol_type = other RNA
catagcagcaggatgaagagg

SEQ ID NO: 8296 - RNA, 21 nt, synthetic construct
  misc_feature 1..21: note = HBV-targeting guide sequence portion
  source 1..21: mol_type = other RNA
catagcccatgaaattaagag

SEQ ID NO: 8297 - RNA, 21 nt, synthetic construct
  misc_feature 1..21: note = HBV-targeting guide sequence portion
  source 1..21: mol_type = other RNA
catagcgcctcattctgtggg

SEQ ID NO: 8298 - RNA, 21 nt, synthetic construct
  misc_feature 1..21: note = HBV-targeting guide sequence portion
  source 1..21: mol_type = other RNA
cataggaattttccgaaagcc

SEQ ID NO: 8299 - RNA, 21 nt, synthetic construct
  misc_feature 1..21: note = HBV-targeting guide sequence portion
  source 1..21: mol_type = other RNA
cataggccatcagcgcatgcg

SEQ ID NO: 8300 - RNA, 21 nt, synthetic construct
  misc_feature 1..21: note = HBV-targeting guide sequence portion
  source 1..21: mol_type = other RNA
catataaagaatttggagcta

SEQ ID NO: 8301 - RNA, 21 nt, synthetic construct
  misc_feature 1..21: note = HBV-targeting guide sequence portion
  source 1..21: mol_type = other RNA
catataactgaaagccaaaca

SEQ ID NO: 8302 - RNA, 21 nt, synthetic construct
  misc_feature 1..21: note = HBV-targeting guide sequence portion
  source 1..21: mol_type = other RNA
catatcgtcaatcttctcgag

SEQ ID NO: 8303 - RNA, 21 nt, synthetic construct
  misc_feature 1..21: note = HBV-targeting guide sequence portion
  source 1..21: mol_type = other RNA
catatgagtgttgacataact

SEQ ID NO: 8304 - RNA, 21 nt, synthetic construct
  misc_feature 1..21: note = HBV-targeting guide sequence portion
  source 1..21: mol_type = other RNA
catatgggcctaaagttcaga

SEQ ID NO: 8305 - RNA, 21 nt, synthetic construct
  misc_feature 1..21: note = HBV-targeting guide sequence portion
  source 1..21: mol_type = other RNA
catattcttgggaacaagagc

SEQ ID NO: 8306 - RNA, 21 nt, synthetic construct
  misc_feature 1..21: note = HBV-targeting guide sequence portion
  source 1..21: mol_type = other RNA
catcaaccaccagcacgggac

SEQ ID NO: 8307 - RNA, 21 nt, synthetic construct
  misc_feature 1..21: note = HBV-targeting guide sequence portion
  source 1..21: mol_type = other RNA
catcacatcaggattcctagg

SEQ ID NO: 8308 - RNA, 21 nt, synthetic construct
  misc_feature 1..21: note = HBV-targeting guide sequence portion
  source 1..21: mol_type = other RNA
catcagcaaacacttggcaca

SEQ ID NO: 8309 - RNA, 21 nt, synthetic construct
  misc_feature 1..21: note = HBV-targeting guide sequence portion
  source 1..21: mol_type = other RNA
catcagcgcatgcgtggaacc

SEQ ID NO: 8310 - RNA, 21 nt, synthetic construct
  misc_feature 1..21: note = HBV-targeting guide sequence portion
  source 1..21: mol_type = other RNA
catcaggattcctaggacccc

SEQ ID NO: 8311 - RNA, 21 nt, synthetic construct
  misc_feature 1..21: note = HBV-targeting guide sequence portion
  source 1..21: mol_type = other RNA
catcatacacaaaatcaaaga

SEQ ID NO: 8312 - RNA, 21 nt, synthetic construct
  misc_feature 1..21: note = HBV-targeting guide sequence portion
  source 1..21: mol_type = other RNA
catcatccatataactgaaag

SEQ ID NO: 8313 - RNA, 21 nt, synthetic construct
  misc_feature 1..21: note = HBV-targeting guide sequence portion
  source 1..21: mol_type = other RNA
catcatcctgggctttcggaa

SEQ ID NO: 8314 - RNA, 21 nt, synthetic construct
  misc_feature 1..21: note = HBV-targeting guide sequence portion
  source 1..21: mol_type = other RNA
catccagcgataaccaggaca

SEQ ID NO: 8315 - RNA, 21 nt, synthetic construct
  misc_feature 1..21: note = HBV-targeting guide sequence portion
  source 1..21: mol_type = other RNA
catccatataactgaaagcca

SEQ ID NO: 8316 - RNA, 21 nt, synthetic construct
  misc_feature 1..21: note = HBV-targeting guide sequence portion
  source 1..21: mol_type = other RNA
catcccatcatcctgggcttt

SEQ ID NO: 8317 - RNA, 21 nt, synthetic construct
  misc_feature 1..21: note = HBV-targeting guide sequence portion
  source 1..21: mol_type = other RNA
catcccgatacagagctgcgg

SEQ ID NO: 8318 - RNA, 21 nt, synthetic construct
  misc_feature 1..21: note = HBV-targeting guide sequence portion
  source 1..21: mol_type = other RNA
catccgaaggttttgtacagc

SEQ ID NO: 8319 - RNA, 21 nt, synthetic construct
  misc_feature 1..21: note = HBV-targeting guide sequence portion
  source 1..21: mol_type = other RNA
catcctgctgctatgcctcat

SEQ ID NO: 8320 - RNA, 21 nt, synthetic construct
  misc_feature 1..21: note = HBV-targeting guide sequence portion
  source 1..21: mol_type = other RNA
catcctgggctttcggaaaat

SEQ ID NO: 8321 - RNA, 21 nt, synthetic construct
  misc_feature 1..21: note = HBV-targeting guide sequence portion
  source 1..21: mol_type = other RNA
catcgttcccatggctgctag

SEQ ID NO: 8322 - RNA, 21 nt, synthetic construct
  misc_feature 1..21: note = HBV-targeting guide sequence portion
  source 1..21: mol_type = other RNA
catctacaccaagatattatc

SEQ ID NO: 8323 - RNA, 21 nt, synthetic construct
  misc_feature 1..21: note = HBV-targeting guide sequence portion
  source 1..21: mol_type = other RNA
catctagggacctagtagtca

SEQ ID NO: 8324 - RNA, 21 nt, synthetic construct
  misc_feature 1..21: note = HBV-targeting guide sequence portion
  source 1..21: mol_type = other RNA
catctagttaatcattacttc

SEQ ID NO: 8325 - RNA, 21 nt, synthetic construct
  misc_feature 1..21: note = HBV-targeting guide sequence portion
  source 1..21: mol_type = other RNA
catctcgaggccgcttggggc

SEQ ID NO: 8326 - RNA, 21 nt, synthetic construct
  misc_feature 1..21: note = HBV-targeting guide sequence portion
  source 1..21: mol_type = other RNA
catctcttgttcatgtcctac

SEQ ID NO: 8327 - RNA, 21 nt, synthetic construct
  misc_feature 1..21: note = HBV-targeting guide sequence portion
  source 1..21: mol_type = other RNA
catctctttgttttgttaggg

SEQ ID NO: 8328 - RNA, 21 nt, synthetic construct
  misc_feature 1..21: note = HBV-targeting guide sequence portion
  source 1..21: mol_type = other RNA
catctgccggaccgtgtgcac

SEQ ID NO: 8329 - RNA, 21 nt, synthetic construct
  misc_feature 1..21: note = HBV-targeting guide sequence portion
  source 1..21: mol_type = other RNA
catcttcctcttcatcctgct

SEQ ID NO: 8330 - RNA, 21 nt, synthetic construct
  misc_feature 1..21: note = HBV-targeting guide sequence portion
  source 1..21: mol_type = other RNA
catcttcttgttggttcttct

SEQ ID NO: 8331 - RNA, 21 nt, synthetic construct
  misc_feature 1..21: note = HBV-targeting guide sequence portion
  source 1..21: mol_type = other RNA
catcttgagtccctttatacc

SEQ ID NO: 8332 - RNA, 21 nt, synthetic construct
  misc_feature 1..21: note = HBV-targeting guide sequence portion
  source 1..21: mol_type = other RNA
catgaaattaagagaataacc

SEQ ID NO: 8333 - RNA, 21 nt, synthetic construct
  misc_feature 1..21: note = HBV-targeting guide sequence portion
  source 1..21: mol_type = other RNA
catgaacaagagatgattagg

SEQ ID NO: 8334 - RNA, 21 nt, synthetic construct
  misc_feature 1..21: note = HBV-targeting guide sequence portion
  source 1..21: mol_type = other RNA
catgcaactttttcacctctg

SEQ ID NO: 8335 - RNA, 21 nt, synthetic construct
  misc_feature 1..21: note = HBV-targeting guide sequence portion
  source 1..21: mol_type = other RNA
catgcatacaagggcattaaa

SEQ ID NO: 8336 - RNA, 21 nt, synthetic construct
  misc_feature 1..21: note = HBV-targeting guide sequence portion
  source 1..21: mol_type = other RNA
catgccctaaagccacccaag

SEQ ID NO: 8337 - RNA, 21 nt, synthetic construct
  misc_feature 1..21: note = HBV-targeting guide sequence portion
  source 1..21: mol_type = other RNA
catgcgacgtgcagaggtgaa

SEQ ID NO: 8338 - RNA, 21 nt, synthetic construct
  misc_feature 1..21: note = HBV-targeting guide sequence portion
  source 1..21: mol_type = other RNA
catgcgctgatggcctatgac

SEQ ID NO: 8339 - RNA, 21 nt, synthetic construct
  misc_feature 1..21: note = HBV-targeting guide sequence portion
  source 1..21: mol_type = other RNA
catgcgtggaacctttccggc

SEQ ID NO: 8340 - RNA, 21 nt, synthetic construct
  misc_feature 1..21: note = HBV-targeting guide sequence portion
  source 1..21: mol_type = other RNA
catgctgtagctcttgttccc

SEQ ID NO: 8341 - RNA, 21 nt, synthetic construct
  misc_feature 1..21: note = HBV-targeting guide sequence portion
  source 1..21: mol_type = other RNA
catggacattgacccatataa

SEQ ID NO: 8342 - RNA, 21 nt, synthetic construct
  misc_feature 1..21: note = HBV-targeting guide sequence portion
  source 1..21: mol_type = other RNA
catggagaacatcacatcagg

SEQ ID NO: 8343 - RNA, 21 nt, synthetic construct
  misc_feature 1..21: note = HBV-targeting guide sequence portion
  source 1..21: mol_type = other RNA
catggagaccaccgtgaacgc

SEQ ID NO: 8344 - RNA, 21 nt, synthetic construct
  misc_feature 1..21: note = HBV-targeting guide sequence portion
  source 1..21: mol_type = other RNA
catggcctgaggatgagtgtt

SEQ ID NO: 8345 - RNA, 21 nt, synthetic construct
  misc_feature 1..21: note = HBV-targeting guide sequence portion
  source 1..21: mol_type = other RNA
catggctgctaggctgtgctg

SEQ ID NO: 8346 - RNA, 21 nt, synthetic construct
  misc_feature 1..21: note = HBV-targeting guide sequence portion
  source 1..21: mol_type = other RNA
catgggaacgatgtatatttg

SEQ ID NO: 8347 - RNA, 21 nt, synthetic construct
  misc_feature 1..21: note = HBV-targeting guide sequence portion
  source 1..21: mol_type = other RNA
catgggctatgtcattgattg

SEQ ID NO: 8348 - RNA, 21 nt, synthetic construct
  misc_feature 1..21: note = HBV-targeting guide sequence portion
  source 1..21: mol_type = other RNA
catggggcagaatctttccac

SEQ ID NO: 8349 - RNA, 21 nt, synthetic construct
  misc_feature 1..21: note = HBV-targeting guide sequence portion
  source 1..21: mol_type = other RNA
catggtgctggtgcgcagacc

SEQ ID NO: 8350 - RNA, 21 nt, synthetic construct
  misc_feature 1..21: note = HBV-targeting guide sequence portion
  source 1..21: mol_type = other RNA
catgtattcaatctaagcagg

SEQ ID NO: 8351 - RNA, 21 nt, synthetic construct
  misc_feature 1..21: note = HBV-targeting guide sequence portion
  source 1..21: mol_type = other RNA
catgtcctactgttcaagcct

SEQ ID NO: 8352 - RNA, 21 nt, synthetic construct
  misc_feature 1..21: note = HBV-targeting guide sequence portion
  source 1..21: mol_type = other RNA
catgttcagcgcagggtcccc

SEQ ID NO: 8353 - RNA, 21 nt, synthetic construct
  misc_feature 1..21: note = HBV-targeting guide sequence portion
  source 1..21: mol_type = other RNA
cattaaagcaggataaccaca

SEQ ID NO: 8354 - RNA, 21 nt, synthetic construct
  misc_feature 1..21: note = HBV-targeting guide sequence portion
  source 1..21: mol_type = other RNA
cattaactgtaagcgggccta

SEQ ID NO: 8355 - RNA, 21 nt, synthetic construct
  misc_feature 1..21: note = HBV-targeting guide sequence portion
  source 1..21: mol_type = other RNA
cattaatctaatctcctcccc

SEQ ID NO: 8356 - RNA, 21 nt, synthetic construct
  misc_feature 1..21: note = HBV-targeting guide sequence portion
  source 1..21: mol_type = other RNA
cattacttccaaactagacac

SEQ ID NO: 8357 - RNA, 21 nt, synthetic construct
  misc_feature 1..21: note = HBV-targeting guide sequence portion
  source 1..21: mol_type = other RNA
cattagttctccccagcaaag

SEQ ID NO: 8358 - RNA, 21 nt, synthetic construct
  misc_feature 1..21: note = HBV-targeting guide sequence portion
  source 1..21: mol_type = other RNA
cattatgccctgagcctgagg

SEQ ID NO: 8359 - RNA, 21 nt, synthetic construct
  misc_feature 1..21: note = HBV-targeting guide sequence portion
  source 1..21: mol_type = other RNA
cattcgggctagggttcaccc

SEQ ID NO: 8360 - RNA, 21 nt, synthetic construct
  misc_feature 1..21: note = HBV-targeting guide sequence portion
  source 1..21: mol_type = other RNA
cattctcgggactgacaactc

SEQ ID NO: 8361 - RNA, 21 nt, synthetic construct
  misc_feature 1..21: note = HBV-targeting guide sequence portion
  source 1..21: mol_type = other RNA
cattctgtgggtcaccatatt

SEQ ID NO: 8362 - RNA, 21 nt, synthetic construct
  misc_feature 1..21: note = HBV-targeting guide sequence portion
  source 1..21: mol_type = other RNA
cattctttgattttgtgtatg

SEQ ID NO: 8363 - RNA, 21 nt, synthetic construct
  misc_feature 1..21: note = HBV-targeting guide sequence portion
  source 1..21: mol_type = other RNA
cattgacccatataaagaatt

SEQ ID NO: 8364 - RNA, 21 nt, synthetic construct
  misc_feature 1..21: note = HBV-targeting guide sequence portion
  source 1..21: mol_type = other RNA
cattgagatccccgagattga

SEQ ID NO: 8365 - RNA, 21 nt, synthetic construct
  misc_feature 1..21: note = HBV-targeting guide sequence portion
  source 1..21: mol_type = other RNA
cattgattgttggggatcatt

SEQ ID NO: 8366 - RNA, 21 nt, synthetic construct
  misc_feature 1..21: note = HBV-targeting guide sequence portion
  source 1..21: mol_type = other RNA
cattgcagagagtccaagagt

SEQ ID NO: 8367 - RNA, 21 nt, synthetic construct
  misc_feature 1..21: note = HBV-targeting guide sequence portion
  source 1..21: mol_type = other RNA
cattgccacaaaatcacatca

SEQ ID NO: 8368 - RNA, 21 nt, synthetic construct
  misc_feature 1..21: note = HBV-targeting guide sequence portion
  source 1..21: mol_type = other RNA
cattggaaaacaccctctttt

SEQ ID NO: 8369 - RNA, 21 nt, synthetic construct
  misc_feature 1..21: note = HBV-targeting guide sequence portion
  source 1..21: mol_type = other RNA
cattgtgtaaaaggggcagca

SEQ ID NO: 8370 - RNA, 21 nt, synthetic construct
  misc_feature 1..21: note = HBV-targeting guide sequence portion
  source 1..21: mol_type = other RNA
cattgttcacctcaccatact

SEQ ID NO: 8371 - RNA, 21 nt, synthetic construct
  misc_feature 1..21: note = HBV-targeting guide sequence portion
  source 1..21: mol_type = other RNA
catttaaaccctaacaaaaca

SEQ ID NO: 8372 - RNA, 21 nt, synthetic construct
  misc_feature 1..21: note = HBV-targeting guide sequence portion
  source 1..21: mol_type = other RNA
catttcttgtcttacttttgg

SEQ ID NO: 8373 - RNA, 21 nt, synthetic construct
  misc_feature 1..21: note = HBV-targeting guide sequence portion
  source 1..21: mol_type = other RNA
catttggtggtctataagctg

SEQ ID NO: 8374 - RNA, 21 nt, synthetic construct
  misc_feature 1..21: note = HBV-targeting guide sequence portion
  source 1..21: mol_type = other RNA
catttgttcagtggttcgtag

SEQ ID NO: 8375 - RNA, 21 nt, synthetic construct
  misc_feature 1..21: note = HBV-targeting guide sequence portion
  source 1..21: mol_type = other RNA
cattttttgataatatcttgg

SEQ ID NO: 8376 - RNA, 21 nt, synthetic construct
  misc_feature 1..21: note = HBV-targeting guide sequence portion
  source 1..21: mol_type = other RNA
ccaaaagacaccaaatactct

SEQ ID NO: 8377 - RNA, 21 nt, synthetic construct
  misc_feature 1..21: note = HBV-targeting guide sequence portion
  source 1..21: mol_type = other RNA
ccaaaaggcctccgtgcggtg

SEQ ID NO: 8378 - RNA, 21 nt, synthetic construct
  misc_feature 1..21: note = HBV-targeting guide sequence portion
  source 1..21: mol_type = other RNA
ccaaaagtaagacaagaaatg

SEQ ID NO: 8379 - RNA, 21 nt, synthetic construct
  misc_feature 1..21: note = HBV-targeting guide sequence portion
  source 1..21: mol_type = other RNA
ccaaaattcgcagtccccaac

SEQ ID NO: 8380 - RNA, 21 nt, synthetic construct
  misc_feature 1..21: note = HBV-targeting guide sequence portion
  source 1..21: mol_type = other RNA
ccaaacagtgggggaaagccc

SEQ ID NO: 8381 - RNA, 21 nt, synthetic construct
  misc_feature 1..21: note = HBV-targeting guide sequence portion
  source 1..21: mol_type = other RNA
ccaaactagacactatttaca

SEQ ID NO: 8382 - RNA, 21 nt, synthetic construct
  misc_feature 1..21: note = HBV-targeting guide sequence portion
  source 1..21: mol_type = other RNA
ccaaactctgcaagatcccag

SEQ ID NO: 8383 - RNA, 21 nt, synthetic construct
  misc_feature 1..21: note = HBV-targeting guide sequence portion
  source 1..21: mol_type = other RNA
ccaaagacaaaagaaaattgg

SEQ ID NO: 8384 - RNA, 21 nt, synthetic construct
  misc_feature 1..21: note = HBV-targeting guide sequence portion
  source 1..21: mol_type = other RNA
ccaaatactctaggaccgttt

SEQ ID NO: 8385 - RNA, 21 nt, synthetic construct
  misc_feature 1..21: note = HBV-targeting guide sequence portion
  source 1..21: mol_type = other RNA
ccaaatacttgcccttggata

SEQ ID NO: 8386 - RNA, 21 nt, synthetic construct
  misc_feature 1..21: note = HBV-targeting guide sequence portion
  source 1..21: mol_type = other RNA
ccaaatgcccctatcctatca

SEQ ID NO: 8387 - RNA, 21 nt, synthetic construct
  misc_feature 1..21: note = HBV-targeting guide sequence portion
  source 1..21: mol_type = other RNA
ccaaattctttatatgggtca

SEQ ID NO: 8388 - RNA, 21 nt, synthetic construct
  misc_feature 1..21: note = HBV-targeting guide sequence portion
  source 1..21: mol_type = other RNA
ccaacaagaagatgaggcata

SEQ ID NO: 8389 - RNA, 21 nt, synthetic construct
  misc_feature 1..21: note = HBV-targeting guide sequence portion
  source 1..21: mol_type = other RNA
ccaacaaggatccctggccag

SEQ ID NO: 8390 - RNA, 21 nt, synthetic construct
  misc_feature 1..21: note = HBV-targeting guide sequence portion
  source 1..21: mol_type = other RNA
ccaacaaggtaggagctggag

SEQ ID NO: 8391 - RNA, 21 nt, synthetic construct
  misc_feature 1..21: note = HBV-targeting guide sequence portion
  source 1..21: mol_type = other RNA
ccaacaatcaatgacatagcc

SEQ ID NO: 8392 - RNA, 21 nt, synthetic construct
  misc_feature 1..21: note = HBV-targeting guide sequence portion
  source 1..21: mol_type = other RNA
ccaacaatccagattgggact

SEQ ID NO: 8393 - RNA, 21 nt, synthetic construct
  misc_feature 1..21: note = HBV-targeting guide sequence portion
  source 1..21: mol_type = other RNA
ccaaccagtgggggttgcatc

SEQ ID NO: 8394 - RNA, 21 nt, synthetic construct
  misc_feature 1..21: note = HBV-targeting guide sequence portion
  source 1..21: mol_type = other RNA
ccaacctccaatcactcacca

SEQ ID NO: 8395 - RNA, 21 nt, synthetic construct
  misc_feature 1..21: note = HBV-targeting guide sequence portion
  source 1..21: mol_type = other RNA
ccaacctcctgtcctccaact

SEQ ID NO: 8396 - RNA, 21 nt, synthetic construct
  misc_feature 1..21: note = HBV-targeting guide sequence portion
  source 1..21: mol_type = other RNA
ccaactcctcccagtctttaa

SEQ ID NO: 8397 - RNA, 21 nt, synthetic construct
  misc_feature 1..21: note = HBV-targeting guide sequence portion
  source 1..21: mol_type = other RNA
ccaactggatcctgcgcggga

SEQ ID NO: 8398 - RNA, 21 nt, synthetic construct
  misc_feature 1..21: note = HBV-targeting guide sequence portion
  source 1..21: mol_type = other RNA
ccaactggtggtcgggaaaga

SEQ ID NO: 8399 - RNA, 21 nt, synthetic construct
  misc_feature 1..21: note = HBV-targeting guide sequence portion
  source 1..21: mol_type = other RNA
ccaacttacaaggcctttctg

SEQ ID NO: 8400 - RNA, 21 nt, synthetic construct
  misc_feature 1..21: note = HBV-targeting guide sequence portion
  source 1..21: mol_type = other RNA
ccaacttgtcctggttatcgc

SEQ ID NO: 8401 - RNA, 21 nt, synthetic construct
  misc_feature 1..21: note = HBV-targeting guide sequence portion
  source 1..21: mol_type = other RNA
ccaagaatatggtgacccaca

SEQ ID NO: 8402 - RNA, 21 nt, synthetic construct
  misc_feature 1..21: note = HBV-targeting guide sequence portion
  source 1..21: mol_type = other RNA
ccaagacacacggtagttccc

SEQ ID NO: 8403 - RNA, 21 nt, synthetic construct
  misc_feature 1..21: note = HBV-targeting guide sequence portion
  source 1..21: mol_type = other RNA
ccaagagaaacgggctgaggc

SEQ ID NO: 8404 - RNA, 21 nt, synthetic construct
  misc_feature 1..21: note = HBV-targeting guide sequence portion
  source 1..21: mol_type = other RNA
ccaagagtcctcttatgtaag

SEQ ID NO: 8405 - RNA, 21 nt, synthetic construct
  misc_feature 1..21: note = HBV-targeting guide sequence portion
  source 1..21: mol_type = other RNA
ccaagatattatcaaaaaatg

SEQ ID NO: 8406 - RNA, 21 nt, synthetic construct
  misc_feature 1..21: note = HBV-targeting guide sequence portion
  source 1..21: mol_type = other RNA
ccaagccccaaccagtggggg

SEQ ID NO: 8407 - RNA, 21 nt, synthetic construct
  misc_feature 1..21: note = HBV-targeting guide sequence portion
  source 1..21: mol_type = other RNA
ccaagcggcctcgagatgggt

SEQ ID NO: 8408 - RNA, 21 nt, synthetic construct
  misc_feature 1..21: note = HBV-targeting guide sequence portion
  source 1..21: mol_type = other RNA
ccaagctgtgccttgggtggc

SEQ ID NO: 8409 - RNA, 21 nt, synthetic construct
  misc_feature 1..21: note = HBV-targeting guide sequence portion
  source 1..21: mol_type = other RNA
ccaaggcacagcttggaggct

SEQ ID NO: 8410 - RNA, 21 nt, synthetic construct
  misc_feature 1..21: note = HBV-targeting guide sequence portion
  source 1..21: mol_type = other RNA
ccaaggcatcccgatacagag

SEQ ID NO: 8411 - RNA, 21 nt, synthetic construct
  misc_feature 1..21: note = HBV-targeting guide sequence portion
  source 1..21: mol_type = other RNA
ccaagggatactaacattgag

SEQ ID NO: 8412 - RNA, 21 nt, synthetic construct
  misc_feature 1..21: note = HBV-targeting guide sequence portion
  source 1..21: mol_type = other RNA
ccaagggcaagtatttggtga

SEQ ID NO: 8413 - RNA, 21 nt, synthetic construct
  misc_feature 1..21: note = HBV-targeting guide sequence portion
  source 1..21: mol_type = other RNA
ccaaggtcttacataagagga

SEQ ID NO: 8414 - RNA, 21 nt, synthetic construct
  misc_feature 1..21: note = HBV-targeting guide sequence portion
  source 1..21: mol_type = other RNA
ccaagtctgtacagcatcttg

SEQ ID NO: 8415 - RNA, 21 nt, synthetic construct
  misc_feature 1..21: note = HBV-targeting guide sequence portion
  source 1..21: mol_type = other RNA
ccaagtgtttgctgatgcaac

SEQ ID NO: 8416 - RNA, 21 nt, synthetic construct
  misc_feature 1..21: note = HBV-targeting guide sequence portion
  source 1..21: mol_type = other RNA
ccaataccacatcatccatat

SEQ ID NO: 8417 - RNA, 21 nt, synthetic construct
  misc_feature 1..21: note = HBV-targeting guide sequence portion
  source 1..21: mol_type = other RNA
ccaatcaataggcctgttaac

SEQ ID NO: 8418 - RNA, 21 nt, synthetic construct
  misc_feature 1..21: note = HBV-targeting guide sequence portion
  source 1..21: mol_type = other RNA
ccaatcactcaccaacctcct

SEQ ID NO: 8419 - RNA, 21 nt, synthetic construct
  misc_feature 1..21: note = HBV-targeting guide sequence portion
  source 1..21: mol_type = other RNA
ccaatcctcgagaagattgac

SEQ ID NO: 8420 - RNA, 21 nt, synthetic construct
  misc_feature 1..21: note = HBV-targeting guide sequence portion
  source 1..21: mol_type = other RNA
ccaatcgccagtcaggacggc

SEQ ID NO: 8421 - RNA, 21 nt, synthetic construct
  misc_feature 1..21: note = HBV-targeting guide sequence portion
  source 1..21: mol_type = other RNA
ccaatctggattgttggagtt

SEQ ID NO: 8422 - RNA, 21 nt, synthetic construct
  misc_feature 1..21: note = HBV-targeting guide sequence portion
  source 1..21: mol_type = other RNA
ccaatgagggttaaagacagg

SEQ ID NO: 8423 - RNA, 21 nt, synthetic construct
  misc_feature 1..21: note = HBV-targeting guide sequence portion
  source 1..21: mol_type = other RNA
ccaattcttgcccaaggtctt

SEQ ID NO: 8424 - RNA, 21 nt, synthetic construct
  misc_feature 1..21: note = HBV-targeting guide sequence portion
  source 1..21: mol_type = other RNA
ccaatttatgcctacagcctc

SEQ ID NO: 8425 - RNA, 21 nt, synthetic construct
  misc_feature 1..21: note = HBV-targeting guide sequence portion
  source 1..21: mol_type = other RNA
ccaattttcttttgtctttgg

SEQ ID NO: 8426 - RNA, 21 nt, synthetic construct
  misc_feature 1..21: note = HBV-targeting guide sequence portion
  source 1..21: mol_type = other RNA
ccacaaaatcacatcatacac

SEQ ID NO: 8427 - RNA, 21 nt, synthetic construct
  misc_feature 1..21: note = HBV-targeting guide sequence portion
  source 1..21: mol_type = other RNA
ccacaaccttccaccaaactc

SEQ ID NO: 8428 - RNA, 21 nt, synthetic construct
  misc_feature 1..21: note = HBV-targeting guide sequence portion
  source 1..21: mol_type = other RNA
ccacaatagttgtctgaactt

SEQ ID NO: 8429 - RNA, 21 nt, synthetic construct
  misc_feature 1..21: note = HBV-targeting guide sequence portion
  source 1..21: mol_type = other RNA
ccacaattcgttgacacactt

SEQ ID NO: 8430 - RNA, 21 nt, synthetic construct
  misc_feature 1..21: note = HBV-targeting guide sequence portion
  source 1..21: mol_type = other RNA
ccacactccaaaagacaccaa

SEQ ID NO: 8431 - RNA, 21 nt, synthetic construct
  misc_feature 1..21: note = HBV-targeting guide sequence portion
  source 1..21: mol_type = other RNA
ccacagaatgaggcgctatgt

SEQ ID NO: 8432 - RNA, 21 nt, synthetic construct
  misc_feature 1..21: note = HBV-targeting guide sequence portion
  source 1..21: mol_type = other RNA
ccacagtagctccaaattctt

SEQ ID NO: 8433 - RNA, 21 nt, synthetic construct
  misc_feature 1..21: note = HBV-targeting guide sequence portion
  source 1..21: mol_type = other RNA
ccacatcatccatataactga

SEQ ID NO: 8434 - RNA, 21 nt, synthetic construct
  misc_feature 1..21: note = HBV-targeting guide sequence portion
  source 1..21: mol_type = other RNA
ccacattgtgtaaaaggggca

SEQ ID NO: 8435 - RNA, 21 nt, synthetic construct
  misc_feature 1..21: note = HBV-targeting guide sequence portion
  source 1..21: mol_type = other RNA
ccaccaaactctgcaagatcc

SEQ ID NO: 8436 - RNA, 21 nt, synthetic construct
  misc_feature 1..21: note = HBV-targeting guide sequence portion
  source 1..21: mol_type = other RNA
ccaccaaatgcccctatccta

SEQ ID NO: 8437 - RNA, 21 nt, synthetic construct
  misc_feature 1..21: note = HBV-targeting guide sequence portion
  source 1..21: mol_type = other RNA
ccaccaattcttgcccaaggt

SEQ ID NO: 8438 - RNA, 21 nt, synthetic construct
  misc_feature 1..21: note = HBV-targeting guide sequence portion
  source 1..21: mol_type = other RNA
ccaccacgagtctagactctg

SEQ ID NO: 8439 - RNA, 21 nt, synthetic construct
  misc_feature 1..21: note = HBV-targeting guide sequence portion
  source 1..21: mol_type = other RNA
ccaccagcaatcctctgggat

SEQ ID NO: 8440 - RNA, 21 nt, synthetic construct
  misc_feature 1..21: note = HBV-targeting guide sequence portion
  source 1..21: mol_type = other RNA
ccaccagcacgggaccctgca

SEQ ID NO: 8441 - RNA, 21 nt, synthetic construct
  misc_feature 1..21: note = HBV-targeting guide sequence portion
  source 1..21: mol_type = other RNA
ccaccagcagggagatacagg

SEQ ID NO: 8442 - RNA, 21 nt, synthetic construct
  misc_feature 1..21: note = HBV-targeting guide sequence portion
  source 1..21: mol_type = other RNA
ccaccagttggacccagcctt

SEQ ID NO: 8443 - RNA, 21 nt, synthetic construct
  misc_feature 1..21: note = HBV-targeting guide sequence portion
  source 1..21: mol_type = other RNA
ccacccaaggcacagcttgga

SEQ ID NO: 8444 - RNA, 21 nt, synthetic construct
  misc_feature 1..21: note = HBV-targeting guide sequence portion
  source 1..21: mol_type = other RNA
ccacccaggtagctagagtca

SEQ ID NO: 8445 - RNA, 21 nt, synthetic construct
  misc_feature 1..21: note = HBV-targeting guide sequence portion
  source 1..21: mol_type = other RNA
ccaccccaaaaggcctccgtg

SEQ ID NO: 8446 - RNA, 21 nt, synthetic construct
  misc_feature 1..21: note = HBV-targeting guide sequence portion
  source 1..21: mol_type = other RNA
ccaccgcacggaggccttttg

SEQ ID NO: 8447 - RNA, 21 nt, synthetic construct
  misc_feature 1..21: note = HBV-targeting guide sequence portion
  source 1..21: mol_type = other RNA
ccaccgtgaacgcccaccaat

SEQ ID NO: 8448 - RNA, 21 nt, synthetic construct
  misc_feature 1..21: note = HBV-targeting guide sequence portion
  source 1..21: mol_type = other RNA
ccacctctgagaaacactcat

SEQ ID NO: 8449 - RNA, 21 nt, synthetic construct
  misc_feature 1..21: note = HBV-targeting guide sequence portion
  source 1..21: mol_type = other RNA
ccaccttatgagtccaaggga

SEQ ID NO: 8450 - RNA, 21 nt, synthetic construct
  misc_feature 1..21: note = HBV-targeting guide sequence portion
  source 1..21: mol_type = other RNA
ccacgagtctagactctgcgg

SEQ ID NO: 8451 - RNA, 21 nt, synthetic construct
  misc_feature 1..21: note = HBV-targeting guide sequence portion
  source 1..21: mol_type = other RNA
ccacgcatgcgctgatggcct

SEQ ID NO: 8452 - RNA, 21 nt, synthetic construct
  misc_feature 1..21: note = HBV-targeting guide sequence portion
  source 1..21: mol_type = other RNA
ccacggggcgcacctctcttt

SEQ ID NO: 8453 - RNA, 21 nt, synthetic construct
  misc_feature 1..21: note = HBV-targeting guide sequence portion
  source 1..21: mol_type = other RNA
ccactcccataggaattttcc

SEQ ID NO: 8454 - RNA, 21 nt, synthetic construct
  misc_feature 1..21: note = HBV-targeting guide sequence portion
  source 1..21: mol_type = other RNA
ccactgaacaaatggcactag

SEQ ID NO: 8455 - RNA, 21 nt, synthetic construct
  misc_feature 1..21: note = HBV-targeting guide sequence portion
  source 1..21: mol_type = other RNA
ccactgcatggcctgaggatg

SEQ ID NO: 8456 - RNA, 21 nt, synthetic construct
  misc_feature 1..21: note = HBV-targeting guide sequence portion
  source 1..21: mol_type = other RNA
ccactggttggggcttggtca

SEQ ID NO: 8457 - RNA, 21 nt, synthetic construct
  misc_feature 1..21: note = HBV-targeting guide sequence portion
  source 1..21: mol_type = other RNA
ccactgtttggctttcagtta

SEQ ID NO: 8458 - RNA, 21 nt, synthetic construct
  misc_feature 1..21: note = HBV-targeting guide sequence portion
  source 1..21: mol_type = other RNA
ccagaacatctagttaatcat

SEQ ID NO: 8459 - RNA, 21 nt, synthetic construct
  misc_feature 1..21: note = HBV-targeting guide sequence portion
  source 1..21: mol_type = other RNA
ccagaagaaccaacaagaaga

SEQ ID NO: 8460 - RNA, 21 nt, synthetic construct
  misc_feature 1..21: note = HBV-targeting guide sequence portion
  source 1..21: mol_type = other RNA
ccagaagacccacaattcgtt

SEQ ID NO: 8461 - RNA, 21 nt, synthetic construct
  misc_feature 1..21: note = HBV-targeting guide sequence portion
  source 1..21: mol_type = other RNA
ccagaccggctgcgagcaaaa

SEQ ID NO: 8462 - RNA, 21 nt, synthetic construct
  misc_feature 1..21: note = HBV-targeting guide sequence portion
  source 1..21: mol_type = other RNA
ccagacgccaacaaggtagga

SEQ ID NO: 8463 - RNA, 21 nt, synthetic construct
  misc_feature 1..21: note = HBV-targeting guide sequence portion
  source 1..21: mol_type = other RNA
ccagaggattgctggtggaaa

SEQ ID NO: 8464 - RNA, 21 nt, synthetic construct
  misc_feature 1..21: note = HBV-targeting guide sequence portion
  source 1..21: mol_type = other RNA
ccagagtgagaggcctgtatc

SEQ ID NO: 8465 - RNA, 21 nt, synthetic construct
  misc_feature 1..21: note = HBV-targeting guide sequence portion
  source 1..21: mol_type = other RNA
ccagattgggacttcaatccc

SEQ ID NO: 8466 - RNA, 21 nt, synthetic construct
  misc_feature 1..21: note = HBV-targeting guide sequence portion
  source 1..21: mol_type = other RNA
ccagcaaagaattgcttgcct

SEQ ID NO: 8467 - RNA, 21 nt, synthetic construct
  misc_feature 1..21: note = HBV-targeting guide sequence portion
  source 1..21: mol_type = other RNA
ccagcaaatccgcctcctgcc

SEQ ID NO: 8468 - RNA, 21 nt, synthetic construct
  misc_feature 1..21: note = HBV-targeting guide sequence portion
  source 1..21: mol_type = other RNA
ccagcaatcctctgggattct

SEQ ID NO: 8469 - RNA, 21 nt, synthetic construct
  misc_feature 1..21: note = HBV-targeting guide sequence portion
  source 1..21: mol_type = other RNA
ccagcaccatgcaactttttc

SEQ ID NO: 8470 - RNA, 21 nt, synthetic construct
  misc_feature 1..21: note = HBV-targeting guide sequence portion
  source 1..21: mol_type = other RNA
ccagcacgggaccctgcagaa

SEQ ID NO: 8471 - RNA, 21 nt, synthetic construct
  misc_feature 1..21: note = HBV-targeting guide sequence portion
  source 1..21: mol_type = other RNA
ccagcagggagatacaggcct

SEQ ID NO: 8472 - RNA, 21 nt, synthetic construct
  misc_feature 1..21: note = HBV-targeting guide sequence portion
  source 1..21: mol_type = other RNA
ccagccttcagagcaaactcc

SEQ ID NO: 8473 - RNA, 21 nt, synthetic construct
  misc_feature 1..21: note = HBV-targeting guide sequence portion
  source 1..21: mol_type = other RNA
ccagcgataaccaggacaagt

SEQ ID NO: 8474 - RNA, 21 nt, synthetic construct
  misc_feature 1..21: note = HBV-targeting guide sequence portion
  source 1..21: mol_type = other RNA
ccagctcctaccttgttggcg

SEQ ID NO: 8475 - RNA, 21 nt, synthetic construct
  misc_feature 1..21: note = HBV-targeting guide sequence portion
  source 1..21: mol_type = other RNA
ccagcttatagaccaccaaat

SEQ ID NO: 8476 - RNA, 21 nt, synthetic construct
  misc_feature 1..21: note = HBV-targeting guide sequence portion
  source 1..21: mol_type = other RNA
ccaggacaagttggaggacag

SEQ ID NO: 8477 - RNA, 21 nt, synthetic construct
  misc_feature 1..21: note = HBV-targeting guide sequence portion
  source 1..21: mol_type = other RNA
ccaggatcatcaaccaccagc

SEQ ID NO: 8478 - RNA, 21 nt, synthetic construct
  misc_feature 1..21: note = HBV-targeting guide sequence portion
  source 1..21: mol_type = other RNA
ccaggatgatgggatgggaat

SEQ ID NO: 8479 - RNA, 21 nt, synthetic construct
  misc_feature 1..21: note = HBV-targeting guide sequence portion
  source 1..21: mol_type = other RNA
ccaggcaacggccaggtctgt

SEQ ID NO: 8480 - RNA, 21 nt, synthetic construct
  misc_feature 1..21: note = HBV-targeting guide sequence portion
  source 1..21: mol_type = other RNA
ccagggatccttgttgggatt

SEQ ID NO: 8481 - RNA, 21 nt, synthetic construct
  misc_feature 1..21: note = HBV-targeting guide sequence portion
  source 1..21: mol_type = other RNA
ccaggtagctagagtcattag

SEQ ID NO: 8482 - RNA, 21 nt, synthetic construct
  misc_feature 1..21: note = HBV-targeting guide sequence portion
  source 1..21: mol_type = other RNA
ccaggtctgtgccaagtgttt

SEQ ID NO: 8483 - RNA, 21 nt, synthetic construct
  misc_feature 1..21: note = HBV-targeting guide sequence portion
  source 1..21: mol_type = other RNA
ccagtcaggacggcagcctac

SEQ ID NO: 8484 - RNA, 21 nt, synthetic construct
  misc_feature 1..21: note = HBV-targeting guide sequence portion
  source 1..21: mol_type = other RNA
ccagtctttaaacaaacagtc

SEQ ID NO: 8485 - RNA, 21 nt, synthetic construct
  misc_feature 1..21: note = HBV-targeting guide sequence portion
  source 1..21: mol_type = other RNA
ccagtgggggttgcatcagca

SEQ ID NO: 8486 - RNA, 21 nt, synthetic construct
  misc_feature 1..21: note = HBV-targeting guide sequence portion
  source 1..21: mol_type = other RNA
ccagttcaggaacagtaaacc

SEQ ID NO: 8487 - RNA, 21 nt, synthetic construct
  misc_feature 1..21: note = HBV-targeting guide sequence portion
  source 1..21: mol_type = other RNA
ccagttggacccagccttcag

SEQ ID NO: 8488 - RNA, 21 nt, synthetic construct
  misc_feature 1..21: note = HBV-targeting guide sequence portion
  source 1..21: mol_type = other RNA
ccagttggcagcacagcctag

SEQ ID NO: 8489 - RNA, 21 nt, synthetic construct
  misc_feature 1..21: note = HBV-targeting guide sequence portion
  source 1..21: mol_type = other RNA
ccatactgcactcaggcaagc

SEQ ID NO: 8490 - RNA, 21 nt, synthetic construct
  misc_feature 1..21: note = HBV-targeting guide sequence portion
  source 1..21: mol_type = other RNA
ccatactgcggaactcctagc

SEQ ID NO: 8491 - RNA, 21 nt, synthetic construct
  misc_feature 1..21: note = HBV-targeting guide sequence portion
  source 1..21: mol_type = other RNA
ccatagagtgtgtaaatagtg

SEQ ID NO: 8492 - RNA, 21 nt, synthetic construct
  misc_feature 1..21: note = HBV-targeting guide sequence portion
  source 1..21: mol_type = other RNA
ccataggaattttccgaaagc

SEQ ID NO: 8493 - RNA, 21 nt, synthetic construct
  misc_feature 1..21: note = HBV-targeting guide sequence portion
  source 1..21: mol_type = other RNA
ccatataaagaatttggagct

SEQ ID NO: 8494 - RNA, 21 nt, synthetic construct
  misc_feature 1..21: note = HBV-targeting guide sequence portion
  source 1..21: mol_type = other RNA
ccatataactgaaagccaaac

SEQ ID NO: 8495 - RNA, 21 nt, synthetic construct
  misc_feature 1..21: note = HBV-targeting guide sequence portion
  source 1..21: mol_type = other RNA
ccatatgagtgttgacataac

SEQ ID NO: 8496 - RNA, 21 nt, synthetic construct
  misc_feature 1..21: note = HBV-targeting guide sequence portion
  source 1..21: mol_type = other RNA
ccatattcttgggaacaagag

SEQ ID NO: 8497 - RNA, 21 nt, synthetic construct
  misc_feature 1..21: note = HBV-targeting guide sequence portion
  source 1..21: mol_type = other RNA
ccatcagcgcatgcgtggaac

SEQ ID NO: 8498 - RNA, 21 nt, synthetic construct
  misc_feature 1..21: note = HBV-targeting guide sequence portion
  source 1..21: mol_type = other RNA
ccatcatcctgggctttcgga

SEQ ID NO: 8499 - RNA, 21 nt, synthetic construct
  misc_feature 1..21: note = HBV-targeting guide sequence portion
  source 1..21: mol_type = other RNA
ccatcccatcatcctgggctt

SEQ ID NO: 8500 - RNA, 21 nt, synthetic construct
  misc_feature 1..21: note = HBV-targeting guide sequence portion
  source 1..21: mol_type = other RNA
ccatccgaaggttttgtacag

SEQ ID NO: 8501 - RNA, 21 nt, synthetic construct
  misc_feature 1..21: note = HBV-targeting guide sequence portion
  source 1..21: mol_type = other RNA
ccatctcgaggccgcttgggg

SEQ ID NO: 8502 - RNA, 21 nt, synthetic construct
  misc_feature 1..21: note = HBV-targeting guide sequence portion
  source 1..21: mol_type = other RNA
ccatctctttgttttgttagg

SEQ ID NO: 8503 - RNA, 21 nt, synthetic construct
  misc_feature 1..21: note = HBV-targeting guide sequence portion
  source 1..21: mol_type = other RNA
ccatgaaattaagagaataac

SEQ ID NO: 8504 - RNA, 21 nt, synthetic construct
  misc_feature 1..21: note = HBV-targeting guide sequence portion
  source 1..21: mol_type = other RNA
ccatgcaactttttcacctct

SEQ ID NO: 8505 - RNA, 21 nt, synthetic construct
  misc_feature 1..21: note = HBV-targeting guide sequence portion
  source 1..21: mol_type = other RNA
ccatgccctaaagccacccaa

SEQ ID NO: 8506 - RNA, 21 nt, synthetic construct
  misc_feature 1..21: note = HBV-targeting guide sequence portion
  source 1..21: mol_type = other RNA
ccatgcgacgtgcagaggtga

SEQ ID NO: 8507 - RNA, 21 nt, synthetic construct
  misc_feature 1..21: note = HBV-targeting guide sequence portion
  source 1..21: mol_type = other RNA
ccatgctgtagctcttgttcc

SEQ ID NO: 8508 - RNA, 21 nt, synthetic construct
  misc_feature 1..21: note = HBV-targeting guide sequence portion
  source 1..21: mol_type = other RNA
ccatggctgctaggctgtgct

SEQ ID NO: 8509 - RNA, 21 nt, synthetic construct
  misc_feature 1..21: note = HBV-targeting guide sequence portion
  source 1..21: mol_type = other RNA
ccatgggaacgatgtatattt

SEQ ID NO: 8510 - RNA, 21 nt, synthetic construct
  misc_feature 1..21: note = HBV-targeting guide sequence portion
  source 1..21: mol_type = other RNA
ccatgttcagcgcagggtccc

SEQ ID NO: 8511 - RNA, 21 nt, synthetic construct
  misc_feature 1..21: note = HBV-targeting guide sequence portion
  source 1..21: mol_type = other RNA
ccatttgttcagtggttcgta

SEQ ID NO: 8512 - RNA, 21 nt, synthetic construct
  misc_feature 1..21: note = HBV-targeting guide sequence portion
  source 1..21: mol_type = other RNA
cccaaaaggcctccgtgcggt

SEQ ID NO: 8513 - RNA, 21 nt, synthetic construct
  misc_feature 1..21: note = HBV-targeting guide sequence portion
  source 1..21: mol_type = other RNA
cccaaagacaaaagaaaattg

SEQ ID NO: 8514 - RNA, 21 nt, synthetic construct
  misc_feature 1..21: note = HBV-targeting guide sequence portion
  source 1..21: mol_type = other RNA
cccaacaaggatccctggcca

SEQ ID NO: 8515 - RNA, 21 nt, synthetic construct
  misc_feature 1..21: note = HBV-targeting guide sequence portion
  source 1..21: mol_type = other RNA
cccaacaatcaatgacatagc

SEQ ID NO: 8516 - RNA, 21 nt, synthetic construct
  misc_feature 1..21: note = HBV-targeting guide sequence portion
  source 1..21: mol_type = other RNA
cccaaccagtgggggttgcat

SEQ ID NO: 8517 - RNA, 21 nt, synthetic construct
  misc_feature 1..21: note = HBV-targeting guide sequence portion
  source 1..21: mol_type = other RNA
cccaacctccaatcactcacc

SEQ ID NO: 8518 - RNA, 21 nt, synthetic construct
  misc_feature 1..21: note = HBV-targeting guide sequence portion
  source 1..21: mol_type = other RNA
cccaactcctcccagtcttta

SEQ ID NO: 8519 - RNA, 21 nt, synthetic construct
  misc_feature 1..21: note = HBV-targeting guide sequence portion
  source 1..21: mol_type = other RNA
cccaagaatatggtgacccac

SEQ ID NO: 8520 - RNA, 21 nt, synthetic construct
  misc_feature 1..21: note = HBV-targeting guide sequence portion
  source 1..21: mol_type = other RNA
cccaagcggcctcgagatggg

SEQ ID NO: 8521 - RNA, 21 nt, synthetic construct
  misc_feature 1..21: note = HBV-targeting guide sequence portion
  source 1..21: mol_type = other RNA
cccaaggcacagcttggaggc

SEQ ID NO: 8522 - RNA, 21 nt, synthetic construct
  misc_feature 1..21: note = HBV-targeting guide sequence portion
  source 1..21: mol_type = other RNA
cccaaggtcttacataagagg

SEQ ID NO: 8523 - RNA, 21 nt, synthetic construct
  misc_feature 1..21: note = HBV-targeting guide sequence portion
  source 1..21: mol_type = other RNA
cccaataccacatcatccata

SEQ ID NO: 8524 - RNA, 21 nt, synthetic construct
  misc_feature 1..21: note = HBV-targeting guide sequence portion
  source 1..21: mol_type = other RNA
cccaatcctcgagaagattga

SEQ ID NO: 8525 - RNA, 21 nt, synthetic construct
  misc_feature 1..21: note = HBV-targeting guide sequence portion
  source 1..21: mol_type = other RNA
cccaatctggattgttggagt

SEQ ID NO: 8526 - RNA, 21 nt, synthetic construct
  misc_feature 1..21: note = HBV-targeting guide sequence portion
  source 1..21: mol_type = other RNA
cccacaattcgttgacacact

SEQ ID NO: 8527 - RNA, 21 nt, synthetic construct
  misc_feature 1..21: note = HBV-targeting guide sequence portion
  source 1..21: mol_type = other RNA
cccacagaatgaggcgctatg

SEQ ID NO: 8528 - RNA, 21 nt, synthetic construct
  misc_feature 1..21: note = HBV-targeting guide sequence portion
  source 1..21: mol_type = other RNA
cccaccaattcttgcccaagg

SEQ ID NO: 8529 - RNA, 21 nt, synthetic construct
  misc_feature 1..21: note = HBV-targeting guide sequence portion
  source 1..21: mol_type = other RNA
cccacccaggtagctagagtc

SEQ ID NO: 8530 - RNA, 21 nt, synthetic construct
  misc_feature 1..21: note = HBV-targeting guide sequence portion
  source 1..21: mol_type = other RNA
cccaccgcacggaggcctttt

SEQ ID NO: 8531 - RNA, 21 nt, synthetic construct
  misc_feature 1..21: note = HBV-targeting guide sequence portion
  source 1..21: mol_type = other RNA
cccaccttatgagtccaaggg

SEQ ID NO: 8532 - RNA, 21 nt, synthetic construct
  misc_feature 1..21: note = HBV-targeting guide sequence portion
  source 1..21: mol_type = other RNA
cccactcccataggaattttc

SEQ ID NO: 8533 - RNA, 21 nt, synthetic construct
  misc_feature 1..21: note = HBV-targeting guide sequence portion
  source 1..21: mol_type = other RNA
cccactggttggggcttggtc

SEQ ID NO: 8534 - RNA, 21 nt, synthetic construct
  misc_feature 1..21: note = HBV-targeting guide sequence portion
  source 1..21: mol_type = other RNA
cccactgtttggctttcagtt

SEQ ID NO: 8535 - RNA, 21 nt, synthetic construct
  misc_feature 1..21: note = HBV-targeting guide sequence portion
  source 1..21: mol_type = other RNA
cccagaagacccacaattcgt

SEQ ID NO: 8536 - RNA, 21 nt, synthetic construct
  misc_feature 1..21: note = HBV-targeting guide sequence portion
  source 1..21: mol_type = other RNA
cccagaggattgctggtggaa

SEQ ID NO: 8537 - RNA, 21 nt, synthetic construct
  misc_feature 1..21: note = HBV-targeting guide sequence portion
  source 1..21: mol_type = other RNA
cccagagtgagaggcctgtat

SEQ ID NO: 8538 - RNA, 21 nt, synthetic construct
  misc_feature 1..21: note = HBV-targeting guide sequence portion
  source 1..21: mol_type = other RNA
cccagcaaagaattgcttgcc

SEQ ID NO: 8539 - RNA, 21 nt, synthetic construct
  misc_feature 1..21: note = HBV-targeting guide sequence portion
  source 1..21: mol_type = other RNA
cccagccttcagagcaaactc

SEQ ID NO: 8540 - RNA, 21 nt, synthetic construct
  misc_feature 1..21: note = HBV-targeting guide sequence portion
  source 1..21: mol_type = other RNA
cccaggatgatgggatgggaa

SEQ ID NO: 8541 - RNA, 21 nt, synthetic construct
  misc_feature 1..21: note = HBV-targeting guide sequence portion
  source 1..21: mol_type = other RNA
cccaggtagctagagtcatta

SEQ ID NO: 8542 - RNA, 21 nt, synthetic construct
  misc_feature 1..21: note = HBV-targeting guide sequence portion
  source 1..21: mol_type = other RNA
cccagtctttaaacaaacagt

SEQ ID NO: 8543 - RNA, 21 nt, synthetic construct
  misc_feature 1..21: note = HBV-targeting guide sequence portion
  source 1..21: mol_type = other RNA
cccataggaattttccgaaag

SEQ ID NO: 8544 - RNA, 21 nt, synthetic construct
  misc_feature 1..21: note = HBV-targeting guide sequence portion
  source 1..21: mol_type = other RNA
cccatataaagaatttggagc

SEQ ID NO: 8545 - RNA, 21 nt, synthetic construct
  misc_feature 1..21: note = HBV-targeting guide sequence portion
  source 1..21: mol_type = other RNA
cccatatgagtgttgacataa

SEQ ID NO: 8546 - RNA, 21 nt, synthetic construct
  misc_feature 1..21: note = HBV-targeting guide sequence portion
  source 1..21: mol_type = other RNA
cccatcatcctgggctttcgg

SEQ ID NO: 8547 - RNA, 21 nt, synthetic construct
  misc_feature 1..21: note = HBV-targeting guide sequence portion
  source 1..21: mol_type = other RNA
cccatcccatcatcctgggct

SEQ ID NO: 8548 - RNA, 21 nt, synthetic construct
  misc_feature 1..21: note = HBV-targeting guide sequence portion
  source 1..21: mol_type = other RNA
cccatctcgaggccgcttggg

SEQ ID NO: 8549 - RNA, 21 nt, synthetic construct
  misc_feature 1..21: note = HBV-targeting guide sequence portion
  source 1..21: mol_type = other RNA
cccatctctttgttttgttag

SEQ ID NO: 8550 - RNA, 21 nt, synthetic construct
  misc_feature 1..21: note = HBV-targeting guide sequence portion
  source 1..21: mol_type = other RNA
cccatgaaattaagagaataa

SEQ ID NO: 8551 - RNA, 21 nt, synthetic construct
  misc_feature 1..21: note = HBV-targeting guide sequence portion
  source 1..21: mol_type = other RNA
cccatgctgtagctcttgttc

SEQ ID NO: 8552 - RNA, 21 nt, synthetic construct
  misc_feature 1..21: note = HBV-targeting guide sequence portion
  source 1..21: mol_type = other RNA
cccatggctgctaggctgtgc

SEQ ID NO: 8553 - RNA, 21 nt, synthetic construct
  misc_feature 1..21: note = HBV-targeting guide sequence portion
  source 1..21: mol_type = other RNA
ccccaaaaggcctccgtgcgg

SEQ ID NO: 8554 - RNA, 21 nt, synthetic construct
  misc_feature 1..21: note = HBV-targeting guide sequence portion
  source 1..21: mol_type = other RNA
ccccaacaatcaatgacatag

SEQ ID NO: 8555 - RNA, 21 nt, synthetic construct
  misc_feature 1..21: note = HBV-targeting guide sequence portion
  source 1..21: mol_type = other RNA
ccccaaccagtgggggttgca

SEQ ID NO: 8556 - RNA, 21 nt, synthetic construct
  misc_feature 1..21: note = HBV-targeting guide sequence portion
  source 1..21: mol_type = other RNA
ccccaacctccaatcactcac

SEQ ID NO: 8557 - RNA, 21 nt, synthetic construct
  misc_feature 1..21: note = HBV-targeting guide sequence portion
  source 1..21: mol_type = other RNA
ccccaactcctcccagtcttt

SEQ ID NO: 8558 - RNA, 21 nt, synthetic construct
  misc_feature 1..21: note = HBV-targeting guide sequence portion
  source 1..21: mol_type = other RNA
ccccaagcggcctcgagatgg

SEQ ID NO: 8559 - RNA, 21 nt, synthetic construct
  misc_feature 1..21: note = HBV-targeting guide sequence portion
  source 1..21: mol_type = other RNA
ccccaataccacatcatccat

SEQ ID NO: 8560 - RNA, 21 nt, synthetic construct
  misc_feature 1..21: note = HBV-targeting guide sequence portion
  source 1..21: mol_type = other RNA
ccccaatcctcgagaagattg

SEQ ID NO: 8561 - RNA, 21 nt, synthetic construct
  misc_feature 1..21: note = HBV-targeting guide sequence portion
  source 1..21: mol_type = other RNA
ccccaccgcacggaggccttt

SEQ ID NO: 8562 - RNA, 21 nt, synthetic construct
  misc_feature 1..21: note = HBV-targeting guide sequence portion
  source 1..21: mol_type = other RNA
ccccactggttggggcttggt

SEQ ID NO: 8563 - RNA, 21 nt, synthetic construct
  misc_feature 1..21: note = HBV-targeting guide sequence portion
  source 1..21: mol_type = other RNA
ccccactgtttggctttcagt

SEQ ID NO: 8564 - RNA, 21 nt, synthetic construct
  misc_feature 1..21: note = HBV-targeting guide sequence portion
  source 1..21: mol_type = other RNA
ccccagcaaagaattgcttgc

SEQ ID NO: 8565 - RNA, 21 nt, synthetic construct
  misc_feature 1..21: note = HBV-targeting guide sequence portion
  source 1..21: mol_type = other RNA
ccccatctctttgttttgtta

SEQ ID NO: 8566 - RNA, 21 nt, synthetic construct
  misc_feature 1..21: note = HBV-targeting guide sequence portion
  source 1..21: mol_type = other RNA
ccccatgctgtagctcttgtt

SEQ ID NO: 8567 - RNA, 21 nt, synthetic construct
  misc_feature 1..21: note = HBV-targeting guide sequence portion
  source 1..21: mol_type = other RNA
cccccaactcctcccagtctt

SEQ ID NO: 8568 - RNA, 21 nt, synthetic construct
  misc_feature 1..21: note = HBV-targeting guide sequence portion
  source 1..21: mol_type = other RNA
cccccaataccacatcatcca

SEQ ID NO: 8569 - RNA, 21 nt, synthetic construct
  misc_feature 1..21: note = HBV-targeting guide sequence portion
  source 1..21: mol_type = other RNA
cccccactggttggggcttgg

SEQ ID NO: 8570 - RNA, 21 nt, synthetic construct
  misc_feature 1..21: note = HBV-targeting guide sequence portion
  source 1..21: mol_type = other RNA
cccccactgtttggctttcag

SEQ ID NO: 8571 - RNA, 21 nt, synthetic construct
  misc_feature 1..21: note = HBV-targeting guide sequence portion
  source 1..21: mol_type = other RNA
ccccctagaaaattgagagaa

SEQ ID NO: 8572 - RNA, 21 nt, synthetic construct
  misc_feature 1..21: note = HBV-targeting guide sequence portion
  source 1..21: mol_type = other RNA
ccccgagattgagatcttctg

SEQ ID NO: 8573 - RNA, 21 nt, synthetic construct
  misc_feature 1..21: note = HBV-targeting guide sequence portion
  source 1..21: mol_type = other RNA
ccccgcctgtaacacgagcag

SEQ ID NO: 8574 - RNA, 21 nt, synthetic construct
  misc_feature 1..21: note = HBV-targeting guide sequence portion
  source 1..21: mol_type = other RNA
ccccgctgtctccacctctga

SEQ ID NO: 8575 - RNA, 21 nt, synthetic construct
  misc_feature 1..21: note = HBV-targeting guide sequence portion
  source 1..21: mol_type = other RNA
ccccgtaaaatttcccacctt

SEQ ID NO: 8576 - RNA, 21 nt, synthetic construct
  misc_feature 1..21: note = HBV-targeting guide sequence portion
  source 1..21: mol_type = other RNA
ccccgtctgtgccttctcatc

SEQ ID NO: 8577 - RNA, 21 nt, synthetic construct
  misc_feature 1..21: note = HBV-targeting guide sequence portion
  source 1..21: mol_type = other RNA
ccccgtggtcggtcggaacgg

SEQ ID NO: 8578 - RNA, 21 nt, synthetic construct
  misc_feature 1..21: note = HBV-targeting guide sequence portion
  source 1..21: mol_type = other RNA
ccccgttgccaggcaacggcc

SEQ ID NO: 8579 - RNA, 21 nt, synthetic construct
  misc_feature 1..21: note = HBV-targeting guide sequence portion
  source 1..21: mol_type = other RNA
cccctagaaaattgagagaag

SEQ ID NO: 8580 - RNA, 21 nt, synthetic construct
  misc_feature 1..21: note = HBV-targeting guide sequence portion
  source 1..21: mol_type = other RNA
cccctagaagaagaactccct

SEQ ID NO: 8581 - RNA, 21 nt, synthetic construct
  misc_feature 1..21: note = HBV-targeting guide sequence portion
  source 1..21: mol_type = other RNA
cccctatcctatcaacacttc

SEQ ID NO: 8582 - RNA, 21 nt, synthetic construct
  misc_feature 1..21: note = HBV-targeting guide sequence portion
  source 1..21: mol_type = other RNA
cccctgctcgtgttacaggcg

SEQ ID NO: 8583 - RNA, 21 nt, synthetic construct
  misc_feature 1..21: note = HBV-targeting guide sequence portion
  source 1..21: mol_type = other RNA
ccccttttacacaatgtggtt

SEQ ID NO: 8584 - RNA, 21 nt, synthetic construct
  misc_feature 1..21: note = HBV-targeting guide sequence portion
  source 1..21: mol_type = other RNA
cccgaatgctccagctcctac

SEQ ID NO: 8585 - RNA, 21 nt, synthetic construct
  misc_feature 1..21: note = HBV-targeting guide sequence portion
  source 1..21: mol_type = other RNA
cccgaccaccagttggaccca

SEQ ID NO: 8586 - RNA, 21 nt, synthetic construct
  misc_feature 1..21: note = HBV-targeting guide sequence portion
  source 1..21: mol_type = other RNA
cccgagaatgtttgctccaga

SEQ ID NO: 8587 - RNA, 21 nt, synthetic construct
  misc_feature 1..21: note = HBV-targeting guide sequence portion
  source 1..21: mol_type = other RNA
cccgagattgagatcttctgc

SEQ ID NO: 8588 - RNA, 21 nt, synthetic construct
  misc_feature 1..21: note = HBV-targeting guide sequence portion
  source 1..21: mol_type = other RNA
cccgatacagagctgcggcgg

SEQ ID NO: 8589 - RNA, 21 nt, synthetic construct
  misc_feature 1..21: note = HBV-targeting guide sequence portion
  source 1..21: mol_type = other RNA
cccgcaaatatacatcgttcc

SEQ ID NO: 8590 - RNA, 21 nt, synthetic construct
  misc_feature 1..21: note = HBV-targeting guide sequence portion
  source 1..21: mol_type = other RNA
cccgcctgtaacacgagcagg

SEQ ID NO: 8591 - RNA, 21 nt, synthetic construct
  misc_feature 1..21: note = HBV-targeting guide sequence portion
  source 1..21: mol_type = other RNA
cccgccttccatagagtgtgt

SEQ ID NO: 8592 - RNA, 21 nt, synthetic construct
  misc_feature 1..21: note = HBV-targeting guide sequence portion
  source 1..21: mol_type = other RNA
cccgcgcaggatccagttggc

SEQ ID NO: 8593 - RNA, 21 nt, synthetic construct
  misc_feature 1..21: note = HBV-targeting guide sequence portion
  source 1..21: mol_type = other RNA
cccgcggacgacccatctcga

SEQ ID NO: 8594 - RNA, 21 nt, synthetic construct
  misc_feature 1..21: note = HBV-targeting guide sequence portion
  source 1..21: mol_type = other RNA
cccgctgtctccacctctgag

SEQ ID NO: 8595 - RNA, 21 nt, synthetic construct
  misc_feature 1..21: note = HBV-targeting guide sequence portion
  source 1..21: mol_type = other RNA
cccgcttacagttaatgagaa

SEQ ID NO: 8596 - RNA, 21 nt, synthetic construct
  misc_feature 1..21: note = HBV-targeting guide sequence portion
  source 1..21: mol_type = other RNA
cccggttaacaggcctattga

SEQ ID NO: 8597 - RNA, 21 nt, synthetic construct
  misc_feature 1..21: note = HBV-targeting guide sequence portion
  source 1..21: mol_type = other RNA
cccgtaaaatttcccacctta

SEQ ID NO: 8598 - RNA, 21 nt, synthetic construct
  misc_feature 1..21: note = HBV-targeting guide sequence portion
  source 1..21: mol_type = other RNA
cccgtcggcgctgaatcccgc

SEQ ID NO: 8599 - RNA, 21 nt, synthetic construct
  misc_feature 1..21: note = HBV-targeting guide sequence portion
  source 1..21: mol_type = other RNA
cccgtctgtcctctaattcca

SEQ ID NO: 8600 - RNA, 21 nt, synthetic construct
  misc_feature 1..21: note = HBV-targeting guide sequence portion
  source 1..21: mol_type = other RNA
cccgtctgtgccttctcatct

SEQ ID NO: 8601 - RNA, 21 nt, synthetic construct
  misc_feature 1..21: note = HBV-targeting guide sequence portion
  source 1..21: mol_type = other RNA
cccgtgctggtggttgatgat

SEQ ID NO: 8602 - RNA, 21 nt, synthetic construct
  misc_feature 1..21: note = HBV-targeting guide sequence portion
  source 1..21: mol_type = other RNA
cccgtggtcggtcggaacggc

SEQ ID NO: 8603 - RNA, 21 nt, synthetic construct
  misc_feature 1..21: note = HBV-targeting guide sequence portion
  source 1..21: mol_type = other RNA
cccgttgccaggcaacggcca

SEQ ID NO: 8604 - RNA, 21 nt, synthetic construct
  misc_feature 1..21: note = HBV-targeting guide sequence portion
  source 1..21: mol_type = other RNA
cccgtttctcttggctcagtt

SEQ ID NO: 8605 - RNA, 21 nt, synthetic construct
  misc_feature 1..21: note = HBV-targeting guide sequence portion
  source 1..21: mol_type = other RNA
ccctaaagccacccaaggcac

SEQ ID NO: 8606 - RNA, 21 nt, synthetic construct
  misc_feature 1..21: note = HBV-targeting guide sequence portion
  source 1..21: mol_type = other RNA
ccctaacaaaacaaagagatg

SEQ ID NO: 8607 - RNA, 21 nt, synthetic construct
  misc_feature 1..21: note = HBV-targeting guide sequence portion
  source 1..21: mol_type = other RNA
ccctacgaaccactgaacaaa

SEQ ID NO: 8608 - RNA, 21 nt, synthetic construct
  misc_feature 1..21: note = HBV-targeting guide sequence portion
  source 1..21: mol_type = other RNA
ccctagaaaattgagagaagt

SEQ ID NO: 8609 - RNA, 21 nt, synthetic construct
  misc_feature 1..21: note = HBV-targeting guide sequence portion
  source 1..21: mol_type = other RNA
ccctagaagaagaactccctc

SEQ ID NO: 8610 - RNA, 21 nt, synthetic construct
  misc_feature 1..21: note = HBV-targeting guide sequence portion
  source 1..21: mol_type = other RNA
ccctagatgcttgatcttcta

SEQ ID NO: 8611 - RNA, 21 nt, synthetic construct
  misc_feature 1..21: note = HBV-targeting guide sequence portion
  source 1..21: mol_type = other RNA
ccctagcccgaatgctccagc

SEQ ID NO: 8612 - RNA, 21 nt, synthetic construct
  misc_feature 1..21: note = HBV-targeting guide sequence portion
  source 1..21: mol_type = other RNA
ccctatcctatcaacacttcc

SEQ ID NO: 8613 - RNA, 21 nt, synthetic construct
  misc_feature 1..21: note = HBV-targeting guide sequence portion
  source 1..21: mol_type = other RNA
ccctcaggctcagggcataat

SEQ ID NO: 8614 - RNA, 21 nt, synthetic construct
  misc_feature 1..21: note = HBV-targeting guide sequence portion
  source 1..21: mol_type = other RNA
ccctcattggaaaacaccctc

SEQ ID NO: 8615 - RNA, 21 nt, synthetic construct
  misc_feature 1..21: note = HBV-targeting guide sequence portion
  source 1..21: mol_type = other RNA
ccctcctgttgctgtacaaaa

SEQ ID NO: 8616 - RNA, 21 nt, synthetic construct
  misc_feature 1..21: note = HBV-targeting guide sequence portion
  source 1..21: mol_type = other RNA
ccctcgcctcgcagacgaaga

SEQ ID NO: 8617 - RNA, 21 nt, synthetic construct
  misc_feature 1..21: note = HBV-targeting guide sequence portion
  source 1..21: mol_type = other RNA
ccctcttttcctaatatacat

SEQ ID NO: 8618 - RNA, 21 nt, synthetic construct
  misc_feature 1..21: note = HBV-targeting guide sequence portion
  source 1..21: mol_type = other RNA
ccctgagcctgagggctccac

SEQ ID NO: 8619 - RNA, 21 nt, synthetic construct
  misc_feature 1..21: note = HBV-targeting guide sequence portion
  source 1..21: mol_type = other RNA
ccctgcagaacctgcacgact

SEQ ID NO: 8620 - RNA, 21 nt, synthetic construct
  misc_feature 1..21: note = HBV-targeting guide sequence portion
  source 1..21: mol_type = other RNA
ccctgcgctgaacatggagaa

SEQ ID NO: 8621 - RNA, 21 nt, synthetic construct
  misc_feature 1..21: note = HBV-targeting guide sequence portion
  source 1..21: mol_type = other RNA
ccctgctcgtgttacaggcgg

SEQ ID NO: 8622 - RNA, 21 nt, synthetic construct
  misc_feature 1..21: note = HBV-targeting guide sequence portion
  source 1..21: mol_type = other RNA
ccctgctggtggctccagttc

SEQ ID NO: 8623 - RNA, 21 nt, synthetic construct
  misc_feature 1..21: note = HBV-targeting guide sequence portion
  source 1..21: mol_type = other RNA
ccctggccagacgccaacaag

SEQ ID NO: 8624 - RNA, 21 nt, synthetic construct
  misc_feature 1..21: note = HBV-targeting guide sequence portion
  source 1..21: mol_type = other RNA
ccctgtcgtcctcttctctgc

SEQ ID NO: 8625 - RNA, 21 nt, synthetic construct
  misc_feature 1..21: note = HBV-targeting guide sequence portion
  source 1..21: mol_type = other RNA
ccctgttccgactactgcctc

SEQ ID NO: 8626 - RNA, 21 nt, synthetic construct
  misc_feature 1..21: note = HBV-targeting guide sequence portion
  source 1..21: mol_type = other RNA
cccttatccaagggcaagtat

SEQ ID NO: 8627 - RNA, 21 nt, synthetic construct
  misc_feature 1..21: note = HBV-targeting guide sequence portion
  source 1..21: mol_type = other RNA
cccttggactcataaggtggg

SEQ ID NO: 8628 - RNA, 21 nt, synthetic construct
  misc_feature 1..21: note = HBV-targeting guide sequence portion
  source 1..21: mol_type = other RNA
cccttggataagggtattaaa

SEQ ID NO: 8629 - RNA, 21 nt, synthetic construct
  misc_feature 1..21: note = HBV-targeting guide sequence portion
  source 1..21: mol_type = other RNA
cccttgtatgcatgtattcaa

SEQ ID NO: 8630 - RNA, 21 nt, synthetic construct
  misc_feature 1..21: note = HBV-targeting guide sequence portion
  source 1..21: mol_type = other RNA
ccctttataccgctgttacca

SEQ ID NO: 8631 - RNA, 21 nt, synthetic construct
  misc_feature 1..21: note = HBV-targeting guide sequence portion
  source 1..21: mol_type = other RNA
cccttttacacaatgtggtta

SEQ ID NO: 8632 - RNA, 21 nt, synthetic construct
  misc_feature 1..21: note = HBV-targeting guide sequence portion
  source 1..21: mol_type = other RNA
ccgaaagcccaggatgatggg

SEQ ID NO: 8633 - RNA, 21 nt, synthetic construct
  misc_feature 1..21: note = HBV-targeting guide sequence portion
  source 1..21: mol_type = other RNA
ccgaaggttttgtacagcaac

SEQ ID NO: 8634 - RNA, 21 nt, synthetic construct
  misc_feature 1..21: note = HBV-targeting guide sequence portion
  source 1..21: mol_type = other RNA
ccgaatgctccagctcctacc

SEQ ID NO: 8635 - RNA, 21 nt, synthetic construct
  misc_feature 1..21: note = HBV-targeting guide sequence portion
  source 1..21: mol_type = other RNA
ccgaccaccagttggacccag

SEQ ID NO: 8636 - RNA, 21 nt, synthetic construct
  misc_feature 1..21: note = HBV-targeting guide sequence portion
  source 1..21: mol_type = other RNA
ccgaccacggggcgcacctct

SEQ ID NO: 8637 - RNA, 21 nt, synthetic construct
  misc_feature 1..21: note = HBV-targeting guide sequence portion
  source 1..21: mol_type = other RNA
ccgaccgaccacggggcgcac

SEQ ID NO: 8638 - RNA, 21 nt, synthetic construct
  misc_feature 1..21: note = HBV-targeting guide sequence portion
  source 1..21: mol_type = other RNA
ccgaccttgaggcatacttca

SEQ ID NO: 8639 - RNA, 21 nt, synthetic construct
  misc_feature 1..21: note = HBV-targeting guide sequence portion
  source 1..21: mol_type = other RNA
ccgacgggacgtaaacaaagg

SEQ ID NO: 8640 - RNA, 21 nt, synthetic construct
  misc_feature 1..21: note = HBV-targeting guide sequence portion
  source 1..21: mol_type = other RNA
ccgactactgcctctcacata

SEQ ID NO: 8641 - RNA, 21 nt, synthetic construct
  misc_feature 1..21: note = HBV-targeting guide sequence portion
  source 1..21: mol_type = other RNA
ccgagaatgtttgctccagac

SEQ ID NO: 8642 - RNA, 21 nt, synthetic construct
  misc_feature 1..21: note = HBV-targeting guide sequence portion
  source 1..21: mol_type = other RNA
ccgagattgagatcttctgcg

SEQ ID NO: 8643 - RNA, 21 nt, synthetic construct
  misc_feature 1..21: note = HBV-targeting guide sequence portion
  source 1..21: mol_type = other RNA
ccgatacagagctgcggcggt

SEQ ID NO: 8644 - RNA, 21 nt, synthetic construct
  misc_feature 1..21: note = HBV-targeting guide sequence portion
  source 1..21: mol_type = other RNA
ccgatccatactgcggaactc

SEQ ID NO: 8645 - RNA, 21 nt, synthetic construct
  misc_feature 1..21: note = HBV-targeting guide sequence portion
  source 1..21: mol_type = other RNA
ccgcaaatatacatcgttccc

SEQ ID NO: 8646 - RNA, 21 nt, synthetic construct
  misc_feature 1..21: note = HBV-targeting guide sequence portion
  source 1..21: mol_type = other RNA
ccgcacggaggccttttgggg

SEQ ID NO: 8647 - RNA, 21 nt, synthetic construct
  misc_feature 1..21: note = HBV-targeting guide sequence portion
  source 1..21: mol_type = other RNA
ccgcagacacatccagcgata

SEQ ID NO: 8648 - RNA, 21 nt, synthetic construct
  misc_feature 1..21: note = HBV-targeting guide sequence portion
  source 1..21: mol_type = other RNA
ccgcagagtctagactcgtgg

SEQ ID NO: 8649 - RNA, 21 nt, synthetic construct
  misc_feature 1..21: note = HBV-targeting guide sequence portion
  source 1..21: mol_type = other RNA
ccgcagctctgtatcgggatg

SEQ ID NO: 8650 - RNA, 21 nt, synthetic construct
  misc_feature 1..21: note = HBV-targeting guide sequence portion
  source 1..21: mol_type = other RNA
ccgcagtatggatcggcagag

SEQ ID NO: 8651 - RNA, 21 nt, synthetic construct
  misc_feature 1..21: note = HBV-targeting guide sequence portion
  source 1..21: mol_type = other RNA
ccgccgcagctctgtatcggg

SEQ ID NO: 8652 - RNA, 21 nt, synthetic construct
  misc_feature 1..21: note = HBV-targeting guide sequence portion
  source 1..21: mol_type = other RNA
ccgcctcctgcctctaccaat

SEQ ID NO: 8653 - RNA, 21 nt, synthetic construct
  misc_feature 1..21: note = HBV-targeting guide sequence portion
  source 1..21: mol_type = other RNA
ccgcctgtaacacgagcaggg

SEQ ID NO: 8654 - RNA, 21 nt, synthetic construct
  misc_feature 1..21: note = HBV-targeting guide sequence portion
  source 1..21: mol_type = other RNA
ccgccttccatagagtgtgta

SEQ ID NO: 8655 - RNA, 21 nt, synthetic construct
  misc_feature 1..21: note = HBV-targeting guide sequence portion
  source 1..21: mol_type = other RNA
ccgcgcaggatccagttggca

SEQ ID NO: 8656 - RNA, 21 nt, synthetic construct
  misc_feature 1..21: note = HBV-targeting guide sequence portion
  source 1..21: mol_type = other RNA
ccgcggacgacccatctcgag

SEQ ID NO: 8657 - RNA, 21 nt, synthetic construct
  misc_feature 1..21: note = HBV-targeting guide sequence portion
  source 1..21: mol_type = other RNA
ccgcgggattcagcgccgacg

SEQ ID NO: 8658 - RNA, 21 nt, synthetic construct
  misc_feature 1..21: note = HBV-targeting guide sequence portion
  source 1..21: mol_type = other RNA
ccgcgtaaagagaggtgcgcc

SEQ ID NO: 8659 - RNA, 21 nt, synthetic construct
  misc_feature 1..21: note = HBV-targeting guide sequence portion
  source 1..21: mol_type = other RNA
ccgcgtcgcagaagatctcaa

SEQ ID NO: 8660 - RNA, 21 nt, synthetic construct
  misc_feature 1..21: note = HBV-targeting guide sequence portion
  source 1..21: mol_type = other RNA
ccgctgtctccacctctgaga

SEQ ID NO: 8661 - RNA, 21 nt, synthetic construct
  misc_feature 1..21: note = HBV-targeting guide sequence portion
  source 1..21: mol_type = other RNA
ccgctgttaccaattttcttt

SEQ ID NO: 8662 - RNA, 21 nt, synthetic construct
  misc_feature 1..21: note = HBV-targeting guide sequence portion
  source 1..21: mol_type = other RNA
ccgcttacagttaatgagaaa

SEQ ID NO: 8663 - RNA, 21 nt, synthetic construct
  misc_feature 1..21: note = HBV-targeting guide sequence portion
  source 1..21: mol_type = other RNA
ccgcttggggccctgtcgtcc

SEQ ID NO: 8664 - RNA, 21 nt, synthetic construct
  misc_feature 1..21: note = HBV-targeting guide sequence portion
  source 1..21: mol_type = other RNA
ccgcttgttttgctcgcagcc

SEQ ID NO: 8665 - RNA, 21 nt, synthetic construct
  misc_feature 1..21: note = HBV-targeting guide sequence portion
  source 1..21: mol_type = other RNA
ccggaaaggttccacgcatgc

SEQ ID NO: 8666 - RNA, 21 nt, synthetic construct
  misc_feature 1..21: note = HBV-targeting guide sequence portion
  source 1..21: mol_type = other RNA
ccggaagtgttgataggatag

SEQ ID NO: 8667 - RNA, 21 nt, synthetic construct
  misc_feature 1..21: note = HBV-targeting guide sequence portion
  source 1..21: mol_type = other RNA
ccggaccgtgtgcacttcgct

SEQ ID NO: 8668 - RNA, 21 nt, synthetic construct
  misc_feature 1..21: note = HBV-targeting guide sequence portion
  source 1..21: mol_type = other RNA
ccggagacttgtgttgttaga

SEQ ID NO: 8669 - RNA, 21 nt, synthetic construct
  misc_feature 1..21: note = HBV-targeting guide sequence portion
  source 1..21: mol_type = other RNA
ccggcagatgagaaggcacag

SEQ ID NO: 8670 - RNA, 21 nt, synthetic construct
  misc_feature 1..21: note = HBV-targeting guide sequence portion
  source 1..21: mol_type = other RNA
ccggctcctctgccgatccat

SEQ ID NO: 8671 - RNA, 21 nt, synthetic construct
  misc_feature 1..21: note = HBV-targeting guide sequence portion
  source 1..21: mol_type = other RNA
ccggctgcgagcaaaacaagc

SEQ ID NO: 8672 - RNA, 21 nt, synthetic construct
  misc_feature 1..21: note = HBV-targeting guide sequence portion
  source 1..21: mol_type = other RNA
ccgggagttttctgaaacatt

SEQ ID NO: 8673 - RNA, 21 nt, synthetic construct
  misc_feature 1..21: note = HBV-targeting guide sequence portion
  source 1..21: mol_type = other RNA
ccggtctggagcaaacattct

SEQ ID NO: 8674 - RNA, 21 nt, synthetic construct
  misc_feature 1..21: note = HBV-targeting guide sequence portion
  source 1..21: mol_type = other RNA
ccggttaacaggcctattgat

SEQ ID NO: 8675 - RNA, 21 nt, synthetic construct
  misc_feature 1..21: note = HBV-targeting guide sequence portion
  source 1..21: mol_type = other RNA
ccgtaaaatttcccaccttat

SEQ ID NO: 8676 - RNA, 21 nt, synthetic construct
  misc_feature 1..21: note = HBV-targeting guide sequence portion
  source 1..21: mol_type = other RNA
ccgtacgagatcttctagata

SEQ ID NO: 8677 - RNA, 21 nt, synthetic construct
  misc_feature 1..21: note = HBV-targeting guide sequence portion
  source 1..21: mol_type = other RNA
ccgtcctgactggcgattggt

SEQ ID NO: 8678 - RNA, 21 nt, synthetic construct
  misc_feature 1..21: note = HBV-targeting guide sequence portion
  source 1..21: mol_type = other RNA
ccgtcggcgctgaatcccgcg

SEQ ID NO: 8679 - RNA, 21 nt, synthetic construct
  misc_feature 1..21: note = HBV-targeting guide sequence portion
  source 1..21: mol_type = other RNA
ccgtctgtcctctaattccag

SEQ ID NO: 8680 - RNA, 21 nt, synthetic construct
  misc_feature 1..21: note = HBV-targeting guide sequence portion
  source 1..21: mol_type = other RNA
ccgtctgtgccttctcatctg

SEQ ID NO: 8681 - RNA, 21 nt, synthetic construct
  misc_feature 1..21: note = HBV-targeting guide sequence portion
  source 1..21: mol_type = other RNA
ccgtcttttctcattaactgt

SEQ ID NO: 8682 - RNA, 21 nt, synthetic construct
  misc_feature 1..21: note = HBV-targeting guide sequence portion
  source 1..21: mol_type = other RNA
ccgtgaacgcccaccaattct

SEQ ID NO: 8683 - RNA, 21 nt, synthetic construct
  misc_feature 1..21: note = HBV-targeting guide sequence portion
  source 1..21: mol_type = other RNA
ccgtgcggtggggtgaaccct

SEQ ID NO: 8684 - RNA, 21 nt, synthetic construct
  misc_feature 1..21: note = HBV-targeting guide sequence portion
  source 1..21: mol_type = other RNA
ccgtgctggtggttgatgatc

SEQ ID NO: 8685 - RNA, 21 nt, synthetic construct
  misc_feature 1..21: note = HBV-targeting guide sequence portion
  source 1..21: mol_type = other RNA
ccgtggtcggtcggaacggca

SEQ ID NO: 8686 - RNA, 21 nt, synthetic construct
  misc_feature 1..21: note = HBV-targeting guide sequence portion
  source 1..21: mol_type = other RNA
ccgtgtgcacttcgcttcacc

SEQ ID NO: 8687 - RNA, 21 nt, synthetic construct
  misc_feature 1..21: note = HBV-targeting guide sequence portion
  source 1..21: mol_type = other RNA
ccgtgtgtcttggccaaaatt

SEQ ID NO: 8688 - RNA, 21 nt, synthetic construct
  misc_feature 1..21: note = HBV-targeting guide sequence portion
  source 1..21: mol_type = other RNA
ccgttccgaccgaccacgggg

SEQ ID NO: 8689 - RNA, 21 nt, synthetic construct
  misc_feature 1..21: note = HBV-targeting guide sequence portion
  source 1..21: mol_type = other RNA
ccgttgccaggcaacggccag

SEQ ID NO: 8690 - RNA, 21 nt, synthetic construct
  misc_feature 1..21: note = HBV-targeting guide sequence portion
  source 1..21: mol_type = other RNA
ccgttgcctggcaacggggta

SEQ ID NO: 8691 - RNA, 21 nt, synthetic construct
  misc_feature 1..21: note = HBV-targeting guide sequence portion
  source 1..21: mol_type = other RNA
ccgtttctcttccaaaagtaa

SEQ ID NO: 8692 - RNA, 21 nt, synthetic construct
  misc_feature 1..21: note = HBV-targeting guide sequence portion
  source 1..21: mol_type = other RNA
ccgtttctcttggctcagttt

SEQ ID NO: 8693 - RNA, 21 nt, synthetic construct
  misc_feature 1..21: note = HBV-targeting guide sequence portion
  source 1..21: mol_type = other RNA
cctaaagccacccaaggcaca

SEQ ID NO: 8694 - RNA, 21 nt, synthetic construct
  misc_feature 1..21: note = HBV-targeting guide sequence portion
  source 1..21: mol_type = other RNA
cctaaagttcagacaactatt

SEQ ID NO: 8695 - RNA, 21 nt, synthetic construct
  misc_feature 1..21: note = HBV-targeting guide sequence portion
  source 1..21: mol_type = other RNA
cctaaattcaccaaatacttg

SEQ ID NO: 8696 - RNA, 21 nt, synthetic construct
  misc_feature 1..21: note = HBV-targeting guide sequence portion
  source 1..21: mol_type = other RNA
cctaacaaaacaaagagatgg

SEQ ID NO: 8697 - RNA, 21 nt, synthetic construct
  misc_feature 1..21: note = HBV-targeting guide sequence portion
  source 1..21: mol_type = other RNA
cctaatatacatctacaccaa

SEQ ID NO: 8698 - RNA, 21 nt, synthetic construct
  misc_feature 1..21: note = HBV-targeting guide sequence portion
  source 1..21: mol_type = other RNA
cctaatcatctcttgttcatg

SEQ ID NO: 8699 - RNA, 21 nt, synthetic construct
  misc_feature 1..21: note = HBV-targeting guide sequence portion
  source 1..21: mol_type = other RNA
cctacaaactgttcacatttt

SEQ ID NO: 8700 - RNA, 21 nt, synthetic construct
  misc_feature 1..21: note = HBV-targeting guide sequence portion
  source 1..21: mol_type = other RNA
cctacagcctcctagtacaaa

SEQ ID NO: 8701 - RNA, 21 nt, synthetic construct
  misc_feature 1..21: note = HBV-targeting guide sequence portion
  source 1..21: mol_type = other RNA
cctaccccgctgtctccacct

SEQ ID NO: 8702 - RNA, 21 nt, synthetic construct
  misc_feature 1..21: note = HBV-targeting guide sequence portion
  source 1..21: mol_type = other RNA
cctaccttgttggcgtctggc

SEQ ID NO: 8703 - RNA, 21 nt, synthetic construct
  misc_feature 1..21: note = HBV-targeting guide sequence portion
  source 1..21: mol_type = other RNA
cctacgaaccactgaacaaat

SEQ ID NO: 8704 - RNA, 21 nt, synthetic construct
  misc_feature 1..21: note = HBV-targeting guide sequence portion
  source 1..21: mol_type = other RNA
cctactgttcaagcctccaag

SEQ ID NO: 8705 - RNA, 21 nt, synthetic construct
  misc_feature 1..21: note = HBV-targeting guide sequence portion
  source 1..21: mol_type = other RNA
cctagaaaattgagagaagtc

SEQ ID NO: 8706 - RNA, 21 nt, synthetic construct
  misc_feature 1..21: note = HBV-targeting guide sequence portion
  source 1..21: mol_type = other RNA
cctagaagaagaactccctcg

SEQ ID NO: 8707 - RNA, 21 nt, synthetic construct
  misc_feature 1..21: note = HBV-targeting guide sequence portion
  source 1..21: mol_type = other RNA
cctagagtatttggtgtcttt

SEQ ID NO: 8708 - RNA, 21 nt, synthetic construct
  misc_feature 1..21: note = HBV-targeting guide sequence portion
  source 1..21: mol_type = other RNA
cctagatgcttgatcttctaa

SEQ ID NO: 8709 - RNA, 21 nt, synthetic construct
  misc_feature 1..21: note = HBV-targeting guide sequence portion
  source 1..21: mol_type = other RNA
cctagcagccatgggaacgat

SEQ ID NO: 8710 - RNA, 21 nt, synthetic construct
  misc_feature 1..21: note = HBV-targeting guide sequence portion
  source 1..21: mol_type = other RNA
cctagcaggcataatcaattt

SEQ ID NO: 8711 - RNA, 21 nt, synthetic construct
  misc_feature 1..21: note = HBV-targeting guide sequence portion
  source 1..21: mol_type = other RNA
cctagcccgaatgctccagct

SEQ ID NO: 8712 - RNA, 21 nt, synthetic construct
  misc_feature 1..21: note = HBV-targeting guide sequence portion
  source 1..21: mol_type = other RNA
cctagccgcttgttttgctcg

SEQ ID NO: 8713 - RNA, 21 nt, synthetic construct
  misc_feature 1..21: note = HBV-targeting guide sequence portion
  source 1..21: mol_type = other RNA
cctaggaatcctgatgtgatg

SEQ ID NO: 8714 - RNA, 21 nt, synthetic construct
  misc_feature 1..21: note = HBV-targeting guide sequence portion
  source 1..21: mol_type = other RNA
cctaggacccctgctcgtgtt

SEQ ID NO: 8715 - RNA, 21 nt, synthetic construct
  misc_feature 1..21: note = HBV-targeting guide sequence portion
  source 1..21: mol_type = other RNA
cctagtacaaagatcattaat

SEQ ID NO: 8716 - RNA, 21 nt, synthetic construct
  misc_feature 1..21: note = HBV-targeting guide sequence portion
  source 1..21: mol_type = other RNA
cctagtagtcagttatgtcaa

SEQ ID NO: 8717 - RNA, 21 nt, synthetic construct
  misc_feature 1..21: note = HBV-targeting guide sequence portion
  source 1..21: mol_type = other RNA
cctatcaacacttccggagac

SEQ ID NO: 8718 - RNA, 21 nt, synthetic construct
  misc_feature 1..21: note = HBV-targeting guide sequence portion
  source 1..21: mol_type = other RNA
cctatcctatcaacacttccg

SEQ ID NO: 8719 - RNA, 21 nt, synthetic construct
  misc_feature 1..21: note = HBV-targeting guide sequence portion
  source 1..21: mol_type = other RNA
cctatgaccaagccccaacca

SEQ ID NO: 8720 - RNA, 21 nt, synthetic construct
  misc_feature 1..21: note = HBV-targeting guide sequence portion
  source 1..21: mol_type = other RNA
cctatgggagtgggcctcagc

SEQ ID NO: 8721 - RNA, 21 nt, synthetic construct
  misc_feature 1..21: note = HBV-targeting guide sequence portion
  source 1..21: mol_type = other RNA
cctattgattggaaagtgtgt

SEQ ID NO: 8722 - RNA, 21 nt, synthetic construct
  misc_feature 1..21: note = HBV-targeting guide sequence portion
  source 1..21: mol_type = other RNA
cctcaaggtcggtcgttgaca

SEQ ID NO: 8723 - RNA, 21 nt, synthetic construct
  misc_feature 1..21: note = HBV-targeting guide sequence portion
  source 1..21: mol_type = other RNA
cctcacaataccgcagagtct

SEQ ID NO: 8724 - RNA, 21 nt, synthetic construct
  misc_feature 1..21: note = HBV-targeting guide sequence portion
  source 1..21: mol_type = other RNA
cctcaccatactgcactcagg

SEQ ID NO: 8725 - RNA, 21 nt, synthetic construct
  misc_feature 1..21: note = HBV-targeting guide sequence portion
  source 1..21: mol_type = other RNA
cctcagcccgtttctcttggc

SEQ ID NO: 8726 - RNA, 21 nt, synthetic construct
  misc_feature 1..21: note = HBV-targeting guide sequence portion
  source 1..21: mol_type = other RNA
cctcaggctcagggcataatg

SEQ ID NO: 8727 - RNA, 21 nt, synthetic construct
  misc_feature 1..21: note = HBV-targeting guide sequence portion
  source 1..21: mol_type = other RNA
cctcatcttcttgttggttct

SEQ ID NO: 8728 - RNA, 21 nt, synthetic construct
  misc_feature 1..21: note = HBV-targeting guide sequence portion
  source 1..21: mol_type = other RNA
cctcattctgtgggtcaccat

SEQ ID NO: 8729 - RNA, 21 nt, synthetic construct
  misc_feature 1..21: note = HBV-targeting guide sequence portion
  source 1..21: mol_type = other RNA
cctcattggaaaacaccctct

SEQ ID NO: 8730 - RNA, 21 nt, synthetic construct
  misc_feature 1..21: note = HBV-targeting guide sequence portion
  source 1..21: mol_type = other RNA
cctccaacttgtcctggttat

SEQ ID NO: 8731 - RNA, 21 nt, synthetic construct
  misc_feature 1..21: note = HBV-targeting guide sequence portion
  source 1..21: mol_type = other RNA
cctccaagctgtgccttgggt

SEQ ID NO: 8732 - RNA, 21 nt, synthetic construct
  misc_feature 1..21: note = HBV-targeting guide sequence portion
  source 1..21: mol_type = other RNA
cctccaatcactcaccaacct

SEQ ID NO: 8733 - RNA, 21 nt, synthetic construct
  misc_feature 1..21: note = HBV-targeting guide sequence portion
  source 1..21: mol_type = other RNA
cctccagcttatagaccacca

SEQ ID NO: 8734 - RNA, 21 nt, synthetic construct
  misc_feature 1..21: note = HBV-targeting guide sequence portion
  source 1..21: mol_type = other RNA
cctcccagtctttaaacaaac

SEQ ID NO: 8735 - RNA, 21 nt, synthetic construct
  misc_feature 1..21: note = HBV-targeting guide sequence portion
  source 1..21: mol_type = other RNA
cctcccccaactcctcccagt

SEQ ID NO: 8736 - RNA, 21 nt, synthetic construct
  misc_feature 1..21: note = HBV-targeting guide sequence portion
  source 1..21: mol_type = other RNA
cctccgtgcggtggggtgaac

SEQ ID NO: 8737 - RNA, 21 nt, synthetic construct
  misc_feature 1..21: note = HBV-targeting guide sequence portion
  source 1..21: mol_type = other RNA
cctcctagtacaaagatcatt

SEQ ID NO: 8738 - RNA, 21 nt, synthetic construct
  misc_feature 1..21: note = HBV-targeting guide sequence portion
  source 1..21: mol_type = other RNA
cctcctgcctctaccaatcgc

SEQ ID NO: 8739 - RNA, 21 nt, synthetic construct
  misc_feature 1..21: note = HBV-targeting guide sequence portion
  source 1..21: mol_type = other RNA
cctcctgtcctccaacttgtc

SEQ ID NO: 8740 - RNA, 21 nt, synthetic construct
  misc_feature 1..21: note = HBV-targeting guide sequence portion
  source 1..21: mol_type = other RNA
cctcctgttgctgtacaaaac

SEQ ID NO: 8741 - RNA, 21 nt, synthetic construct
  misc_feature 1..21: note = HBV-targeting guide sequence portion
  source 1..21: mol_type = other RNA
cctcgagaagattgacgatat

SEQ ID NO: 8742 - RNA, 21 nt, synthetic construct
  misc_feature 1..21: note = HBV-targeting guide sequence portion
  source 1..21: mol_type = other RNA
cctcgagatgggtcgtccgcg

SEQ ID NO: 8743 - RNA, 21 nt, synthetic construct
  misc_feature 1..21: note = HBV-targeting guide sequence portion
  source 1..21: mol_type = other RNA
cctcgcagacgaagatctcaa

SEQ ID NO: 8744 - RNA, 21 nt, synthetic construct
  misc_feature 1..21: note = HBV-targeting guide sequence portion
  source 1..21: mol_type = other RNA
cctcgcctcgcagacgaagat

SEQ ID NO: 8745 - RNA, 21 nt, synthetic construct
  misc_feature 1..21: note = HBV-targeting guide sequence portion
  source 1..21: mol_type = other RNA
cctcgtcgtctaacaacacaa

SEQ ID NO: 8746 - RNA, 21 nt, synthetic construct
  misc_feature 1..21: note = HBV-targeting guide sequence portion
  source 1..21: mol_type = other RNA
cctctaattccaggatcatca

SEQ ID NO: 8747 - RNA, 21 nt, synthetic construct
  misc_feature 1..21: note = HBV-targeting guide sequence portion
  source 1..21: mol_type = other RNA
cctctaccaatcgccagtcag

SEQ ID NO: 8748 - RNA, 21 nt, synthetic construct
  misc_feature 1..21: note = HBV-targeting guide sequence portion
  source 1..21: mol_type = other RNA
cctctatgtatccctcctgtt

SEQ ID NO: 8749 - RNA, 21 nt, synthetic construct
  misc_feature 1..21: note = HBV-targeting guide sequence portion
  source 1..21: mol_type = other RNA
cctctcacatatcgtcaatct

SEQ ID NO: 8750 - RNA, 21 nt, synthetic construct
  misc_feature 1..21: note = HBV-targeting guide sequence portion
  source 1..21: mol_type = other RNA
cctctcactctgggatcttgc

SEQ ID NO: 8751 - RNA, 21 nt, synthetic construct
  misc_feature 1..21: note = HBV-targeting guide sequence portion
  source 1..21: mol_type = other RNA
cctctcccgcaaatatacatc

SEQ ID NO: 8752 - RNA, 21 nt, synthetic construct
  misc_feature 1..21: note = HBV-targeting guide sequence portion
  source 1..21: mol_type = other RNA
cctctctttacgcggactccc

SEQ ID NO: 8753 - RNA, 21 nt, synthetic construct
  misc_feature 1..21: note = HBV-targeting guide sequence portion
  source 1..21: mol_type = other RNA
cctctgagaaacactcatcct

SEQ ID NO: 8754 - RNA, 21 nt, synthetic construct
  misc_feature 1..21: note = HBV-targeting guide sequence portion
  source 1..21: mol_type = other RNA
cctctgcacgtcgcatggaga

SEQ ID NO: 8755 - RNA, 21 nt, synthetic construct
  misc_feature 1..21: note = HBV-targeting guide sequence portion
  source 1..21: mol_type = other RNA
cctctgccgatccatactgcg

SEQ ID NO: 8756 - RNA, 21 nt, synthetic construct
  misc_feature 1..21: note = HBV-targeting guide sequence portion
  source 1..21: mol_type = other RNA
cctctgcctaatcatctcttg

SEQ ID NO: 8757 - RNA, 21 nt, synthetic construct
  misc_feature 1..21: note = HBV-targeting guide sequence portion
  source 1..21: mol_type = other RNA
cctctgggattctttcccgac

SEQ ID NO: 8758 - RNA, 21 nt, synthetic construct
  misc_feature 1..21: note = HBV-targeting guide sequence portion
  source 1..21: mol_type = other RNA
cctcttatgtaagaccttggg

SEQ ID NO: 8759 - RNA, 21 nt, synthetic construct
  misc_feature 1..21: note = HBV-targeting guide sequence portion
  source 1..21: mol_type = other RNA
cctcttcatcctgctgctatg

SEQ ID NO: 8760 - RNA, 21 nt, synthetic construct
  misc_feature 1..21: note = HBV-targeting guide sequence portion
  source 1..21: mol_type = other RNA
cctcttctctgcctgccgttc

SEQ ID NO: 8761 - RNA, 21 nt, synthetic construct
  misc_feature 1..21: note = HBV-targeting guide sequence portion
  source 1..21: mol_type = other RNA
cctcttttcctaatatacatc

SEQ ID NO: 8762 - RNA, 21 nt, synthetic construct
  misc_feature 1..21: note = HBV-targeting guide sequence portion
  source 1..21: mol_type = other RNA
cctgaacctttaccccgttgc

SEQ ID NO: 8763 - RNA, 21 nt, synthetic construct
  misc_feature 1..21: note = HBV-targeting guide sequence portion
  source 1..21: mol_type = other RNA
cctgaactggagccaccagca

SEQ ID NO: 8764 - RNA, 21 nt, synthetic construct
  misc_feature 1..21: note = HBV-targeting guide sequence portion
  source 1..21: mol_type = other RNA
cctgactggcgattggtagag

SEQ ID NO: 8765 - RNA, 21 nt, synthetic construct
  misc_feature 1..21: note = HBV-targeting guide sequence portion
  source 1..21: mol_type = other RNA
cctgagcattgttcacctcac

SEQ ID NO: 8766 - RNA, 21 nt, synthetic construct
  misc_feature 1..21: note = HBV-targeting guide sequence portion
  source 1..21: mol_type = other RNA
cctgagcctgagggctccacc

SEQ ID NO: 8767 - RNA, 21 nt, synthetic construct
  misc_feature 1..21: note = HBV-targeting guide sequence portion
  source 1..21: mol_type = other RNA
cctgaggatgagtgtttctca

SEQ ID NO: 8768 - RNA, 21 nt, synthetic construct
  misc_feature 1..21: note = HBV-targeting guide sequence portion
  source 1..21: mol_type = other RNA
cctgagggctccaccccaaaa

SEQ ID NO: 8769 - RNA, 21 nt, synthetic construct
  misc_feature 1..21: note = HBV-targeting guide sequence portion
  source 1..21: mol_type = other RNA
cctgagtgcagtatggtgagg

SEQ ID NO: 8770 - RNA, 21 nt, synthetic construct
  misc_feature 1..21: note = HBV-targeting guide sequence portion
  source 1..21: mol_type = other RNA
cctgatgtgatgttctccatg

SEQ ID NO: 8771 - RNA, 21 nt, synthetic construct
  misc_feature 1..21: note = HBV-targeting guide sequence portion
  source 1..21: mol_type = other RNA
cctgcacgactcctgctcaag

SEQ ID NO: 8772 - RNA, 21 nt, synthetic construct
  misc_feature 1..21: note = HBV-targeting guide sequence portion
  source 1..21: mol_type = other RNA
cctgcagaacctgcacgactc

SEQ ID NO: 8773 - RNA, 21 nt, synthetic construct
  misc_feature 1..21: note = HBV-targeting guide sequence portion
  source 1..21: mol_type = other RNA
cctgccgttccgaccgaccac

SEQ ID NO: 8774 - RNA, 21 nt, synthetic construct
  misc_feature 1..21: note = HBV-targeting guide sequence portion
  source 1..21: mol_type = other RNA
cctgcctcgtcgtctaacaac

SEQ ID NO: 8775 - RNA, 21 nt, synthetic construct
  misc_feature 1..21: note = HBV-targeting guide sequence portion
  source 1..21: mol_type = other RNA
cctgcctctaccaatcgccag

SEQ ID NO: 8776 - RNA, 21 nt, synthetic construct
  misc_feature 1..21: note = HBV-targeting guide sequence portion
  source 1..21: mol_type = other RNA
cctgcgcgggacgtcctttgt

SEQ ID NO: 8777 - RNA, 21 nt, synthetic construct
  misc_feature 1..21: note = HBV-targeting guide sequence portion
  source 1..21: mol_type = other RNA
cctgcgctgaacatggagaac

SEQ ID NO: 8778 - RNA, 21 nt, synthetic construct
  misc_feature 1..21: note = HBV-targeting guide sequence portion
  source 1..21: mol_type = other RNA
cctgctaggttttatcctaaa

SEQ ID NO: 8779 - RNA, 21 nt, synthetic construct
  misc_feature 1..21: note = HBV-targeting guide sequence portion
  source 1..21: mol_type = other RNA
cctgctcaaggaacctctatg

SEQ ID NO: 8780 - RNA, 21 nt, synthetic construct
  misc_feature 1..21: note = HBV-targeting guide sequence portion
  source 1..21: mol_type = other RNA
cctgctcgtgttacaggcggg

SEQ ID NO: 8781 - RNA, 21 nt, synthetic construct
  misc_feature 1..21: note = HBV-targeting guide sequence portion
  source 1..21: mol_type = other RNA
cctgctgctatgcctcatctt

SEQ ID NO: 8782 - RNA, 21 nt, synthetic construct
  misc_feature 1..21: note = HBV-targeting guide sequence portion
  source 1..21: mol_type = other RNA
cctgctggtggctccagttca

SEQ ID NO: 8783 - RNA, 21 nt, synthetic construct
  misc_feature 1..21: note = HBV-targeting guide sequence portion
  source 1..21: mol_type = other RNA
cctgcttagattgaatacatg

SEQ ID NO: 8784 - RNA, 21 nt, synthetic construct
  misc_feature 1..21: note = HBV-targeting guide sequence portion
  source 1..21: mol_type = other RNA
cctgctttaatgcccttgtat

SEQ ID NO: 8785 - RNA, 21 nt, synthetic construct
  misc_feature 1..21: note = HBV-targeting guide sequence portion
  source 1..21: mol_type = other RNA
cctggaattagaggacagacg

SEQ ID NO: 8786 - RNA, 21 nt, synthetic construct
  misc_feature 1..21: note = HBV-targeting guide sequence portion
  source 1..21: mol_type = other RNA
cctggcaacggggtaaaggtt

SEQ ID NO: 8787 - RNA, 21 nt, synthetic construct
  misc_feature 1..21: note = HBV-targeting guide sequence portion
  source 1..21: mol_type = other RNA
cctggccagacgccaacaagg

SEQ ID NO: 8788 - RNA, 21 nt, synthetic construct
  misc_feature 1..21: note = HBV-targeting guide sequence portion
  source 1..21: mol_type = other RNA
cctggccgttgcctggcaacg

SEQ ID NO: 8789 - RNA, 21 nt, synthetic construct
  misc_feature 1..21: note = HBV-targeting guide sequence portion
  source 1..21: mol_type = other RNA
cctgggctttcggaaaattcc

SEQ ID NO: 8790 - RNA, 21 nt, synthetic construct
  misc_feature 1..21: note = HBV-targeting guide sequence portion
  source 1..21: mol_type = other RNA
cctgggtgggtactaatttag

SEQ ID NO: 8791 - RNA, 21 nt, synthetic construct
  misc_feature 1..21: note = HBV-targeting guide sequence portion
  source 1..21: mol_type = other RNA
cctggttatcgctggatgtgt

SEQ ID NO: 8792 - RNA, 21 nt, synthetic construct
  misc_feature 1..21: note = HBV-targeting guide sequence portion
  source 1..21: mol_type = other RNA
cctgtaacacgagcaggggtc

SEQ ID NO: 8793 - RNA, 21 nt, synthetic construct
  misc_feature 1..21: note = HBV-targeting guide sequence portion
  source 1..21: mol_type = other RNA
cctgtatctccctgctggtgg

SEQ ID NO: 8794 - RNA, 21 nt, synthetic construct
  misc_feature 1..21: note = HBV-targeting guide sequence portion
  source 1..21: mol_type = other RNA
cctgtattcccatcccatcat

SEQ ID NO: 8795 - RNA, 21 nt, synthetic construct
  misc_feature 1..21: note = HBV-targeting guide sequence portion
  source 1..21: mol_type = other RNA
cctgtcctccaacttgtcctg

SEQ ID NO: 8796 - RNA, 21 nt, synthetic construct
  misc_feature 1..21: note = HBV-targeting guide sequence portion
  source 1..21: mol_type = other RNA
cctgtcgtcctcttctctgcc

SEQ ID NO: 8797 - RNA, 21 nt, synthetic construct
  misc_feature 1..21: note = HBV-targeting guide sequence portion
  source 1..21: mol_type = other RNA
cctgtctttaaccctcattgg

SEQ ID NO: 8798 - RNA, 21 nt, synthetic construct
  misc_feature 1..21: note = HBV-targeting guide sequence portion
  source 1..21: mol_type = other RNA
cctgttaaccgggagttttct

SEQ ID NO: 8799 - RNA, 21 nt, synthetic construct
  misc_feature 1..21: note = HBV-targeting guide sequence portion
  source 1..21: mol_type = other RNA
cctgttccgactactgcctct

SEQ ID NO: 8800 - RNA, 21 nt, synthetic construct
  misc_feature 1..21: note = HBV-targeting guide sequence portion
  source 1..21: mol_type = other RNA
cctgttgctgtacaaaacctt

SEQ ID NO: 8801 - RNA, 21 nt, synthetic construct
  misc_feature 1..21: note = HBV-targeting guide sequence portion
  source 1..21: mol_type = other RNA
ccttatccaagggcaagtatt

SEQ ID NO: 8802 - RNA, 21 nt, synthetic construct
  misc_feature 1..21: note = HBV-targeting guide sequence portion
  source 1..21: mol_type = other RNA
ccttatgagtccaagggatac

SEQ ID NO: 8803 - RNA, 21 nt, synthetic construct
  misc_feature 1..21: note = HBV-targeting guide sequence portion
  source 1..21: mol_type = other RNA
ccttattatccagaacatcta

SEQ ID NO: 8804 - RNA, 21 nt, synthetic construct
  misc_feature 1..21: note = HBV-targeting guide sequence portion
  source 1..21: mol_type = other RNA
ccttcagagcaaactccaaca

SEQ ID NO: 8805 - RNA, 21 nt, synthetic construct
  misc_feature 1..21: note = HBV-targeting guide sequence portion
  source 1..21: mol_type = other RNA
ccttccaccaaactctgcaag

SEQ ID NO: 8806 - RNA, 21 nt, synthetic construct
  misc_feature 1..21: note = HBV-targeting guide sequence portion
  source 1..21: mol_type = other RNA
ccttccatagagtgtgtaaat

SEQ ID NO: 8807 - RNA, 21 nt, synthetic construct
  misc_feature 1..21: note = HBV-targeting guide sequence portion
  source 1..21: mol_type = other RNA
ccttccgtacgagatcttcta

SEQ ID NO: 8808 - RNA, 21 nt, synthetic construct
  misc_feature 1..21: note = HBV-targeting guide sequence portion
  source 1..21: mol_type = other RNA
ccttcggatggaaactgcacc

SEQ ID NO: 8809 - RNA, 21 nt, synthetic construct
  misc_feature 1..21: note = HBV-targeting guide sequence portion
  source 1..21: mol_type = other RNA
ccttctcatctgccggaccgt

SEQ ID NO: 8810 - RNA, 21 nt, synthetic construct
  misc_feature 1..21: note = HBV-targeting guide sequence portion
  source 1..21: mol_type = other RNA
ccttctgacttctttccttcc

SEQ ID NO: 8811 - RNA, 21 nt, synthetic construct
  misc_feature 1..21: note = HBV-targeting guide sequence portion
  source 1..21: mol_type = other RNA
ccttgagcaggagtcgtgcag

SEQ ID NO: 8812 - RNA, 21 nt, synthetic construct
  misc_feature 1..21: note = HBV-targeting guide sequence portion
  source 1..21: mol_type = other RNA
ccttgaggcatacttcaaaga

SEQ ID NO: 8813 - RNA, 21 nt, synthetic construct
  misc_feature 1..21: note = HBV-targeting guide sequence portion
  source 1..21: mol_type = other RNA
ccttgatagtccagaagaacc

SEQ ID NO: 8814 - RNA, 21 nt, synthetic construct
  misc_feature 1..21: note = HBV-targeting guide sequence portion
  source 1..21: mol_type = other RNA
ccttgccagcaaatccgcctc

SEQ ID NO: 8815 - RNA, 21 nt, synthetic construct
  misc_feature 1..21: note = HBV-targeting guide sequence portion
  source 1..21: mol_type = other RNA
ccttggactcataaggtggga

SEQ ID NO: 8816 - RNA, 21 nt, synthetic construct
  misc_feature 1..21: note = HBV-targeting guide sequence portion
  source 1..21: mol_type = other RNA
ccttggagtctcctgagcatt

SEQ ID NO: 8817 - RNA, 21 nt, synthetic construct
  misc_feature 1..21: note = HBV-targeting guide sequence portion
  source 1..21: mol_type = other RNA
ccttggataagggtattaaac

SEQ ID NO: 8818 - RNA, 21 nt, synthetic construct
  misc_feature 1..21: note = HBV-targeting guide sequence portion
  source 1..21: mol_type = other RNA
ccttgggcaagaattggtggg

SEQ ID NO: 8819 - RNA, 21 nt, synthetic construct
  misc_feature 1..21: note = HBV-targeting guide sequence portion
  source 1..21: mol_type = other RNA
ccttgggtggctttagggcat

SEQ ID NO: 8820 - RNA, 21 nt, synthetic construct
  misc_feature 1..21: note = HBV-targeting guide sequence portion
  source 1..21: mol_type = other RNA
ccttgtaagttggcgaaaaag

SEQ ID NO: 8821 - RNA, 21 nt, synthetic construct
  misc_feature 1..21: note = HBV-targeting guide sequence portion
  source 1..21: mol_type = other RNA
ccttgtatgcatgtattcaat

SEQ ID NO: 8822 - RNA, 21 nt, synthetic construct
  misc_feature 1..21: note = HBV-targeting guide sequence portion
  source 1..21: mol_type = other RNA
ccttgttgacaagaatcctca

SEQ ID NO: 8823 - RNA, 21 nt, synthetic construct
  misc_feature 1..21: note = HBV-targeting guide sequence portion
  source 1..21: mol_type = other RNA
ccttgttggcgtctggccagg

SEQ ID NO: 8824 - RNA, 21 nt, synthetic construct
  misc_feature 1..21: note = HBV-targeting guide sequence portion
  source 1..21: mol_type = other RNA
ccttgttgggattgaagtccc

SEQ ID NO: 8825 - RNA, 21 nt, synthetic construct
  misc_feature 1..21: note = HBV-targeting guide sequence portion
  source 1..21: mol_type = other RNA
cctttaccccgttgccaggca

SEQ ID NO: 8826 - RNA, 21 nt, synthetic construct
  misc_feature 1..21: note = HBV-targeting guide sequence portion
  source 1..21: mol_type = other RNA
cctttataccgctgttaccaa

SEQ ID NO: 8827 - RNA, 21 nt, synthetic construct
  misc_feature 1..21: note = HBV-targeting guide sequence portion
  source 1..21: mol_type = other RNA
cctttccggctcctctgccga

SEQ ID NO: 8828 - RNA, 21 nt, synthetic construct
  misc_feature 1..21: note = HBV-targeting guide sequence portion
  source 1..21: mol_type = other RNA
cctttctgtgtaaacaatacc

SEQ ID NO: 8829 - RNA, 21 nt, synthetic construct
  misc_feature 1..21: note = HBV-targeting guide sequence portion
  source 1..21: mol_type = other RNA
cctttgtttacgtcccgtcgg

SEQ ID NO: 8830 - RNA, 21 nt, synthetic construct
  misc_feature 1..21: note = HBV-targeting guide sequence portion
  source 1..21: mol_type = other RNA
ccttttacacaatgtggttat

SEQ ID NO: 8831 - RNA, 21 nt, synthetic construct
  misc_feature 1..21: note = HBV-targeting guide sequence portion
  source 1..21: mol_type = other RNA
ccttttggggtggagccctca

SEQ ID NO: 8832 - RNA, 21 nt, synthetic construct
  misc_feature 1..21: note = HBV-targeting guide sequence portion
  source 1..21: mol_type = other RNA
cgaaaaagtgaaagcctgctt

SEQ ID NO: 8833 - RNA, 21 nt, synthetic construct
  misc_feature 1..21: note = HBV-targeting guide sequence portion
  source 1..21: mol_type = other RNA
cgaaagcccaggatgatggga

SEQ ID NO: 8834 - RNA, 21 nt, synthetic construct
  misc_feature 1..21: note = HBV-targeting guide sequence portion
  source 1..21: mol_type = other RNA
cgaaccactgaacaaatggca

SEQ ID NO: 8835 - RNA, 21 nt, synthetic construct
  misc_feature 1..21: note = HBV-targeting guide sequence portion
  source 1..21: mol_type = other RNA
cgaagatctcaatcgccgcgt

SEQ ID NO: 8836 - RNA, 21 nt, synthetic construct
  misc_feature 1..21: note = HBV-targeting guide sequence portion
  source 1..21: mol_type = other RNA
cgaaggttttgtacagcaaca

SEQ ID NO: 8837 - RNA, 21 nt, synthetic construct
  misc_feature 1..21: note = HBV-targeting guide sequence portion
  source 1..21: mol_type = other RNA
cgaagtgcacacggtccggca

SEQ ID NO: 8838 - RNA, 21 nt, synthetic construct
  misc_feature 1..21: note = HBV-targeting guide sequence portion
  source 1..21: mol_type = other RNA
cgaatccacactccaaaagac

SEQ ID NO: 8839 - RNA, 21 nt, synthetic construct
  misc_feature 1..21: note = HBV-targeting guide sequence portion
  source 1..21: mol_type = other RNA
cgaatgctccagctcctacct

SEQ ID NO: 8840 - RNA, 21 nt, synthetic construct
  misc_feature 1..21: note = HBV-targeting guide sequence portion
  source 1..21: mol_type = other RNA
cgaattgtgggtcttctgggt

SEQ ID NO: 8841 - RNA, 21 nt, synthetic construct
  misc_feature 1..21: note = HBV-targeting guide sequence portion
  source 1..21: mol_type = other RNA
cgaattttggccaagacacac

SEQ ID NO: 8842 - RNA, 21 nt, synthetic construct
  misc_feature 1..21: note = HBV-targeting guide sequence portion
  source 1..21: mol_type = other RNA
cgacagggccccaagcggcct

SEQ ID NO: 8843 - RNA, 21 nt, synthetic construct
  misc_feature 1..21: note = HBV-targeting guide sequence portion
  source 1..21: mol_type = other RNA
cgaccaccagttggacccagc

SEQ ID NO: 8844 - RNA, 21 nt, synthetic construct
  misc_feature 1..21: note = HBV-targeting guide sequence portion
  source 1..21: mol_type = other RNA
cgaccacggggcgcacctctc

SEQ ID NO: 8845 - RNA, 21 nt, synthetic construct
  misc_feature 1..21: note = HBV-targeting guide sequence portion
  source 1..21: mol_type = other RNA
cgacccatctcgaggccgctt

SEQ ID NO: 8846 - RNA, 21 nt, synthetic construct
  misc_feature 1..21: note = HBV-targeting guide sequence portion
  source 1..21: mol_type = other RNA
cgaccgaccacggggcgcacc

SEQ ID NO: 8847 - RNA, 21 nt, synthetic construct
  misc_feature 1..21: note = HBV-targeting guide sequence portion
  source 1..21: mol_type = other RNA
cgaccgaccttgaggcatact

SEQ ID NO: 8848 - RNA, 21 nt, synthetic construct
  misc_feature 1..21: note = HBV-targeting guide sequence portion
  source 1..21: mol_type = other RNA
cgaccttgaggcatacttcaa

SEQ ID NO: 8849 - RNA, 21 nt, synthetic construct
  misc_feature 1..21: note = HBV-targeting guide sequence portion
  source 1..21: mol_type = other RNA
cgacgaggcaggtcccctaga

SEQ ID NO: 8850 - RNA, 21 nt, synthetic construct
  misc_feature 1..21: note = HBV-targeting guide sequence portion
  source 1..21: mol_type = other RNA
cgacgcggcgattgagatctt

SEQ ID NO: 8851 - RNA, 21 nt, synthetic construct
  misc_feature 1..21: note = HBV-targeting guide sequence portion
  source 1..21: mol_type = other RNA
cgacgggacgtaaacaaagga

SEQ ID NO: 8852 - RNA, 21 nt, synthetic construct
  misc_feature 1..21: note = HBV-targeting guide sequence portion
  source 1..21: mol_type = other RNA
cgacgtgcagaggtgaagcga

SEQ ID NO: 8853 - RNA, 21 nt, synthetic construct
  misc_feature 1..21: note = HBV-targeting guide sequence portion
  source 1..21: mol_type = other RNA
cgactactgcctctcacatat

SEQ ID NO: 8854 - RNA, 21 nt, synthetic construct
  misc_feature 1..21: note = HBV-targeting guide sequence portion
  source 1..21: mol_type = other RNA
cgactcctgctcaaggaacct

SEQ ID NO: 8855 - RNA, 21 nt, synthetic construct
  misc_feature 1..21: note = HBV-targeting guide sequence portion
  source 1..21: mol_type = other RNA
cgagaagattgacgatatgtg

SEQ ID NO: 8856 - RNA, 21 nt, synthetic construct
  misc_feature 1..21: note = HBV-targeting guide sequence portion
  source 1..21: mol_type = other RNA
cgagaatgtttgctccagacc

SEQ ID NO: 8857 - RNA, 21 nt, synthetic construct
  misc_feature 1..21: note = HBV-targeting guide sequence portion
  source 1..21: mol_type = other RNA
cgagagtaactccacagtagc

SEQ ID NO: 8858 - RNA, 21 nt, synthetic construct
  misc_feature 1..21: note = HBV-targeting guide sequence portion
  source 1..21: mol_type = other RNA
cgagatcttctagataccgcc

SEQ ID NO: 8859 - RNA, 21 nt, synthetic construct
  misc_feature 1..21: note = HBV-targeting guide sequence portion
  source 1..21: mol_type = other RNA
cgagatgggtcgtccgcggga

SEQ ID NO: 8860 - RNA, 21 nt, synthetic construct
  misc_feature 1..21: note = HBV-targeting guide sequence portion
  source 1..21: mol_type = other RNA
cgagattgagatcttctgcga

SEQ ID NO: 8861 - RNA, 21 nt, synthetic construct
  misc_feature 1..21: note = HBV-targeting guide sequence portion
  source 1..21: mol_type = other RNA
cgagcaaaacaagcggctagg

SEQ ID NO: 8862 - RNA, 21 nt, synthetic construct
  misc_feature 1..21: note = HBV-targeting guide sequence portion
  source 1..21: mol_type = other RNA
cgagcaggggtcctaggaatc

SEQ ID NO: 8863 - RNA, 21 nt, synthetic construct
  misc_feature 1..21: note = HBV-targeting guide sequence portion
  source 1..21: mol_type = other RNA
cgaggattggggaccctgcgc

SEQ ID NO: 8864 - RNA, 21 nt, synthetic construct
  misc_feature 1..21: note = HBV-targeting guide sequence portion
  source 1..21: mol_type = other RNA
cgaggcaggtcccctagaaga

SEQ ID NO: 8865 - RNA, 21 nt, synthetic construct
  misc_feature 1..21: note = HBV-targeting guide sequence portion
  source 1..21: mol_type = other RNA
cgaggccgcttggggccctgt

SEQ ID NO: 8866 - RNA, 21 nt, synthetic construct
  misc_feature 1..21: note = HBV-targeting guide sequence portion
  source 1..21: mol_type = other RNA
cgaggcgagggagttcttctt

SEQ ID NO: 8867 - RNA, 21 nt, synthetic construct
  misc_feature 1..21: note = HBV-targeting guide sequence portion
  source 1..21: mol_type = other RNA
cgagggagttcttcttctagg

SEQ ID NO: 8868 - RNA, 21 nt, synthetic construct
  misc_feature 1..21: note = HBV-targeting guide sequence portion
  source 1..21: mol_type = other RNA
cgagtctagactctgcggtat

SEQ ID NO: 8869 - RNA, 21 nt, synthetic construct
  misc_feature 1..21: note = HBV-targeting guide sequence portion
  source 1..21: mol_type = other RNA
cgataaccaggacaagttgga

SEQ ID NO: 8870 - RNA, 21 nt, synthetic construct
  misc_feature 1..21: note = HBV-targeting guide sequence portion
  source 1..21: mol_type = other RNA
cgatacagagctgcggcggta

SEQ ID NO: 8871 - RNA, 21 nt, synthetic construct
  misc_feature 1..21: note = HBV-targeting guide sequence portion
  source 1..21: mol_type = other RNA
cgatatgtgagaggcagtagt

SEQ ID NO: 8872 - RNA, 21 nt, synthetic construct
  misc_feature 1..21: note = HBV-targeting guide sequence portion
  source 1..21: mol_type = other RNA
cgatccatactgcggaactcc

SEQ ID NO: 8873 - RNA, 21 nt, synthetic construct
  misc_feature 1..21: note = HBV-targeting guide sequence portion
  source 1..21: mol_type = other RNA
cgatgtatatttgcgggagag

SEQ ID NO: 8874 - RNA, 21 nt, synthetic construct
  misc_feature 1..21: note = HBV-targeting guide sequence portion
  source 1..21: mol_type = other RNA
cgattgagatcttcgtctgcg

SEQ ID NO: 8875 - RNA, 21 nt, synthetic construct
  misc_feature 1..21: note = HBV-targeting guide sequence portion
  source 1..21: mol_type = other RNA
cgattggtagaggcaggaggc

SEQ ID NO: 8876 - RNA, 21 nt, synthetic construct
  misc_feature 1..21: note = HBV-targeting guide sequence portion
  source 1..21: mol_type = other RNA
cgcaaatatacatcgttccca

SEQ ID NO: 8877 - RNA, 21 nt, synthetic construct
  misc_feature 1..21: note = HBV-targeting guide sequence portion
  source 1..21: mol_type = other RNA
cgcaccagcaccatgcaactt

SEQ ID NO: 8878 - RNA, 21 nt, synthetic construct
  misc_feature 1..21: note = HBV-targeting guide sequence portion
  source 1..21: mol_type = other RNA
cgcacctctctttacgcggac

SEQ ID NO: 8879 - RNA, 21 nt, synthetic construct
  misc_feature 1..21: note = HBV-targeting guide sequence portion
  source 1..21: mol_type = other RNA
cgcacggaggccttttggggt

SEQ ID NO: 8880 - RNA, 21 nt, synthetic construct
  misc_feature 1..21: note = HBV-targeting guide sequence portion
  source 1..21: mol_type = other RNA
cgcactcctccagcttataga

SEQ ID NO: 8881 - RNA, 21 nt, synthetic construct
  misc_feature 1..21: note = HBV-targeting guide sequence portion
  source 1..21: mol_type = other RNA
cgcagaagatctcaatctcgg

SEQ ID NO: 8882 - RNA, 21 nt, synthetic construct
  misc_feature 1..21: note = HBV-targeting guide sequence portion
  source 1..21: mol_type = other RNA
cgcagacacatccagcgataa

SEQ ID NO: 8883 - RNA, 21 nt, synthetic construct
  misc_feature 1..21: note = HBV-targeting guide sequence portion
  source 1..21: mol_type = other RNA
cgcagaccaatttatgcctac

SEQ ID NO: 8884 - RNA, 21 nt, synthetic construct
  misc_feature 1..21: note = HBV-targeting guide sequence portion
  source 1..21: mol_type = other RNA
cgcagacgaagatctcaatcg

SEQ ID NO: 8885 - RNA, 21 nt, synthetic construct
  misc_feature 1..21: note = HBV-targeting guide sequence portion
  source 1..21: mol_type = other RNA
cgcagagtctagactcgtggt

SEQ ID NO: 8886 - RNA, 21 nt, synthetic construct
  misc_feature 1..21: note = HBV-targeting guide sequence portion
  source 1..21: mol_type = other RNA
cgcagccggtctggagcaaac

SEQ ID NO: 8887 - RNA, 21 nt, synthetic construct
  misc_feature 1..21: note = HBV-targeting guide sequence portion
  source 1..21: mol_type = other RNA
cgcagctctgtatcgggatgc

SEQ ID NO: 8888 - RNA, 21 nt, synthetic construct
  misc_feature 1..21: note = HBV-targeting guide sequence portion
  source 1..21: mol_type = other RNA
cgcaggatccagttggcagca

SEQ ID NO: 8889 - RNA, 21 nt, synthetic construct
  misc_feature 1..21: note = HBV-targeting guide sequence portion
  source 1..21: mol_type = other RNA
cgcagggtccccaatcctcga

SEQ ID NO: 8890 - RNA, 21 nt, synthetic construct
  misc_feature 1..21: note = HBV-targeting guide sequence portion
  source 1..21: mol_type = other RNA
cgcagtatggatcggcagagg

SEQ ID NO: 8891 - RNA, 21 nt, synthetic construct
  misc_feature 1..21: note = HBV-targeting guide sequence portion
  source 1..21: mol_type = other RNA
cgcagtccccaacctccaatc

SEQ ID NO: 8892 - RNA, 21 nt, synthetic construct
  misc_feature 1..21: note = HBV-targeting guide sequence portion
  source 1..21: mol_type = other RNA
cgcatgcgctgatggcctatg

SEQ ID NO: 8893 - RNA, 21 nt, synthetic construct
  misc_feature 1..21: note = HBV-targeting guide sequence portion
  source 1..21: mol_type = other RNA
cgcatgcgtggaacctttccg

SEQ ID NO: 8894 - RNA, 21 nt, synthetic construct
  misc_feature 1..21: note = HBV-targeting guide sequence portion
  source 1..21: mol_type = other RNA
cgcatggagaccaccgtgaac

SEQ ID NO: 8895 - RNA, 21 nt, synthetic construct
  misc_feature 1..21: note = HBV-targeting guide sequence portion
  source 1..21: mol_type = other RNA
cgccaacaaggtaggagctgg

SEQ ID NO: 8896 - RNA, 21 nt, synthetic construct
  misc_feature 1..21: note = HBV-targeting guide sequence portion
  source 1..21: mol_type = other RNA
cgccaacttacaaggcctttc

SEQ ID NO: 8897 - RNA, 21 nt, synthetic construct
  misc_feature 1..21: note = HBV-targeting guide sequence portion
  source 1..21: mol_type = other RNA
cgccagtcaggacggcagcct

SEQ ID NO: 8898 - RNA, 21 nt, synthetic construct
  misc_feature 1..21: note = HBV-targeting guide sequence portion
  source 1..21: mol_type = other RNA
cgcccaccaattcttgcccaa

SEQ ID NO: 8899 - RNA, 21 nt, synthetic construct
  misc_feature 1..21: note = HBV-targeting guide sequence portion
  source 1..21: mol_type = other RNA
cgccccgtggtcggtcggaac

SEQ ID NO: 8900 - RNA, 21 nt, synthetic construct
  misc_feature 1..21: note = HBV-targeting guide sequence portion
  source 1..21: mol_type = other RNA
cgccgacgggacgtaaacaaa

SEQ ID NO: 8901 - RNA, 21 nt, synthetic construct
  misc_feature 1..21: note = HBV-targeting guide sequence portion
  source 1..21: mol_type = other RNA
cgccgcagacacatccagcga

SEQ ID NO: 8902 - RNA, 21 nt, synthetic construct
  misc_feature 1..21: note = HBV-targeting guide sequence portion
  source 1..21: mol_type = other RNA
cgccgcagctctgtatcggga

SEQ ID NO: 8903 - RNA, 21 nt, synthetic construct
  misc_feature 1..21: note = HBV-targeting guide sequence portion
  source 1..21: mol_type = other RNA
cgccgcgtcgcagaagatctc

SEQ ID NO: 8904 - RNA, 21 nt, synthetic construct
  misc_feature 1..21: note = HBV-targeting guide sequence portion
  source 1..21: mol_type = other RNA
cgcctcattctgtgggtcacc

SEQ ID NO: 8905 - RNA, 21 nt, synthetic construct
  misc_feature 1..21: note = HBV-targeting guide sequence portion
  source 1..21: mol_type = other RNA
cgcctcctgcctctaccaatc

SEQ ID NO: 8906 - RNA, 21 nt, synthetic construct
  misc_feature 1..21: note = HBV-targeting guide sequence portion
  source 1..21: mol_type = other RNA
cgcctcgcagacgaagatctc

SEQ ID NO: 8907 - RNA, 21 nt, synthetic construct
  misc_feature 1..21: note = HBV-targeting guide sequence portion
  source 1..21: mol_type = other RNA
cgcctgtaacacgagcagggg

SEQ ID NO: 8908 - RNA, 21 nt, synthetic construct
  misc_feature 1..21: note = HBV-targeting guide sequence portion
  source 1..21: mol_type = other RNA
cgccttccatagagtgtgtaa

SEQ ID NO: 8909 - RNA, 21 nt, synthetic construct
  misc_feature 1..21: note = HBV-targeting guide sequence portion
  source 1..21: mol_type = other RNA
cgcgcaggatccagttggcag

SEQ ID NO: 8910 - RNA, 21 nt, synthetic construct
  misc_feature 1..21: note = HBV-targeting guide sequence portion
  source 1..21: mol_type = other RNA
cgcggacgacccatctcgagg

SEQ ID NO: 8911 - RNA, 21 nt, synthetic construct
  misc_feature 1..21: note = HBV-targeting guide sequence portion
  source 1..21: mol_type = other RNA
cgcggactccccgtctgtgcc

SEQ ID NO: 8912 - RNA, 21 nt, synthetic construct
  misc_feature 1..21: note = HBV-targeting guide sequence portion
  source 1..21: mol_type = other RNA
cgcggcgattgagatcttcgt

SEQ ID NO: 8913 - RNA, 21 nt, synthetic construct
  misc_feature 1..21: note = HBV-targeting guide sequence portion
  source 1..21: mol_type = other RNA
cgcgggacgtcctttgtttac

SEQ ID NO: 8914 - RNA, 21 nt, synthetic construct
  misc_feature 1..21: note = HBV-targeting guide sequence portion
  source 1..21: mol_type = other RNA
cgcgggattcagcgccgacgg

SEQ ID NO: 8915 - RNA, 21 nt, synthetic construct
  misc_feature 1..21: note = HBV-targeting guide sequence portion
  source 1..21: mol_type = other RNA
cgcgtaaagagaggtgcgccc

SEQ ID NO: 8916 - RNA, 21 nt, synthetic construct
  misc_feature 1..21: note = HBV-targeting guide sequence portion
  source 1..21: mol_type = other RNA
cgcgtcgcagaagatctcaat

SEQ ID NO: 8917 - RNA, 21 nt, synthetic construct
  misc_feature 1..21: note = HBV-targeting guide sequence portion
  source 1..21: mol_type = other RNA
cgctatgtgttgacactctct

SEQ ID NO: 8918 - RNA, 21 nt, synthetic construct
  misc_feature 1..21: note = HBV-targeting guide sequence portion
  source 1..21: mol_type = other RNA
cgctgaacatggagaacatca

SEQ ID NO: 8919 - RNA, 21 nt, synthetic construct
  misc_feature 1..21: note = HBV-targeting guide sequence portion
  source 1..21: mol_type = other RNA
cgctgaatcccgcggacgacc

SEQ ID NO: 8920 - RNA, 21 nt, synthetic construct
  misc_feature 1..21: note = HBV-targeting guide sequence portion
  source 1..21: mol_type = other RNA
cgctgatggcctatgaccaag

SEQ ID NO: 8921 - RNA, 21 nt, synthetic construct
  misc_feature 1..21: note = HBV-targeting guide sequence portion
  source 1..21: mol_type = other RNA
cgctggatgtgtctgcggcgt

SEQ ID NO: 8922 - RNA, 21 nt, synthetic construct
  misc_feature 1..21: note = HBV-targeting guide sequence portion
  source 1..21: mol_type = other RNA
cgctgtctccacctctgagaa

SEQ ID NO: 8923 - RNA, 21 nt, synthetic construct
  misc_feature 1..21: note = HBV-targeting guide sequence portion
  source 1..21: mol_type = other RNA
cgctgttaccaattttctttt

SEQ ID NO: 8924 - RNA, 21 nt, synthetic construct
  misc_feature 1..21: note = HBV-targeting guide sequence portion
  source 1..21: mol_type = other RNA
cgcttacagttaatgagaaaa

SEQ ID NO: 8925 - RNA, 21 nt, synthetic construct
  misc_feature 1..21: note = HBV-targeting guide sequence portion
  source 1..21: mol_type = other RNA
cgcttcacctctgcacgtcgc

SEQ ID NO: 8926 - RNA, 21 nt, synthetic construct
  misc_feature 1..21: note = HBV-targeting guide sequence portion
  source 1..21: mol_type = other RNA
cgcttggggccctgtcgtcct

SEQ ID NO: 8927 - RNA, 21 nt, synthetic construct
  misc_feature 1..21: note = HBV-targeting guide sequence portion
  source 1..21: mol_type = other RNA
cgcttgttttgctcgcagccg

SEQ ID NO: 8928 - RNA, 21 nt, synthetic construct
  misc_feature 1..21: note = HBV-targeting guide sequence portion
  source 1..21: mol_type = other RNA
cggaaaattcctatgggagtg

SEQ ID NO: 8929 - RNA, 21 nt, synthetic construct
  misc_feature 1..21: note = HBV-targeting guide sequence portion
  source 1..21: mol_type = other RNA
cggaaaggttccacgcatgcg

SEQ ID NO: 8930 - RNA, 21 nt, synthetic construct
  misc_feature 1..21: note = HBV-targeting guide sequence portion
  source 1..21: mol_type = other RNA
cggaacagggtttactgttcc

SEQ ID NO: 8931 - RNA, 21 nt, synthetic construct
  misc_feature 1..21: note = HBV-targeting guide sequence portion
  source 1..21: mol_type = other RNA
cggaacggcaggcagagaaga

SEQ ID NO: 8932 - RNA, 21 nt, synthetic construct
  misc_feature 1..21: note = HBV-targeting guide sequence portion
  source 1..21: mol_type = other RNA
cggaactcctagccgcttgtt

SEQ ID NO: 8933 - RNA, 21 nt, synthetic construct
  misc_feature 1..21: note = HBV-targeting guide sequence portion
  source 1..21: mol_type = other RNA
cggaaggaaagaagtcagaag

SEQ ID NO: 8934 - RNA, 21 nt, synthetic construct
  misc_feature 1..21: note = HBV-targeting guide sequence portion
  source 1..21: mol_type = other RNA
cggaagtgttgataggatagg

SEQ ID NO: 8935 - RNA, 21 nt, synthetic construct
  misc_feature 1..21: note = HBV-targeting guide sequence portion
  source 1..21: mol_type = other RNA
cggaccgtgtgcacttcgctt

SEQ ID NO: 8936 - RNA, 21 nt, synthetic construct
  misc_feature 1..21: note = HBV-targeting guide sequence portion
  source 1..21: mol_type = other RNA
cggacgacccatctcgaggcc

SEQ ID NO: 8937 - RNA, 21 nt, synthetic construct
  misc_feature 1..21: note = HBV-targeting guide sequence portion
  source 1..21: mol_type = other RNA
cggactccccgtctgtgcctt

SEQ ID NO: 8938 - RNA, 21 nt, synthetic construct
  misc_feature 1..21: note = HBV-targeting guide sequence portion
  source 1..21: mol_type = other RNA
cggagacttgtgttgttagac

SEQ ID NO: 8939 - RNA, 21 nt, synthetic construct
  misc_feature 1..21: note = HBV-targeting guide sequence portion
  source 1..21: mol_type = other RNA
cggaggccttttggggtggag

SEQ ID NO: 8940 - RNA, 21 nt, synthetic construct
  misc_feature 1..21: note = HBV-targeting guide sequence portion
  source 1..21: mol_type = other RNA
cggatggaaactgcacctgta

SEQ ID NO: 8941 - RNA, 21 nt, synthetic construct
  misc_feature 1..21: note = HBV-targeting guide sequence portion
  source 1..21: mol_type = other RNA
cggatttgctggcaaggtttg

SEQ ID NO: 8942 - RNA, 21 nt, synthetic construct
  misc_feature 1..21: note = HBV-targeting guide sequence portion
  source 1..21: mol_type = other RNA
cggcagaggagccggaaaggt

SEQ ID NO: 8943 - RNA, 21 nt, synthetic construct
  misc_feature 1..21: note = HBV-targeting guide sequence portion
  source 1..21: mol_type = other RNA
cggcagatgagaaggcacaga

SEQ ID NO: 8944 - RNA, 21 nt, synthetic construct
  misc_feature 1..21: note = HBV-targeting guide sequence portion
  source 1..21: mol_type = other RNA
cggcagcctaccccgctgtct

SEQ ID NO: 8945 - RNA, 21 nt, synthetic construct
  misc_feature 1..21: note = HBV-targeting guide sequence portion
  source 1..21: mol_type = other RNA
cggcaggcagagaagaggacg

SEQ ID NO: 8946 - RNA, 21 nt, synthetic construct
  misc_feature 1..21: note = HBV-targeting guide sequence portion
  source 1..21: mol_type = other RNA
cggccaggtctgtgccaagtg

SEQ ID NO: 8947 - RNA, 21 nt, synthetic construct
  misc_feature 1..21: note = HBV-targeting guide sequence portion
  source 1..21: mol_type = other RNA
cggcctcgagatgggtcgtcc

SEQ ID NO: 8948 - RNA, 21 nt, synthetic construct
  misc_feature 1..21: note = HBV-targeting guide sequence portion
  source 1..21: mol_type = other RNA
cggcgattgagatcttcgtct

SEQ ID NO: 8949 - RNA, 21 nt, synthetic construct
  misc_feature 1..21: note = HBV-targeting guide sequence portion
  source 1..21: mol_type = other RNA
cggcgctgaatcccgcggacg

SEQ ID NO: 8950 - RNA, 21 nt, synthetic construct
  misc_feature 1..21: note = HBV-targeting guide sequence portion
  source 1..21: mol_type = other RNA
cggcggtatctagaagatctc

SEQ ID NO: 8951 - RNA, 21 nt, synthetic construct
  misc_feature 1..21: note = HBV-targeting guide sequence portion
  source 1..21: mol_type = other RNA
cggcgttttatcatcttcctc

SEQ ID NO: 8952 - RNA, 21 nt, synthetic construct
  misc_feature 1..21: note = HBV-targeting guide sequence portion
  source 1..21: mol_type = other RNA
cggctaggagttccgcagtat

SEQ ID NO: 8953 - RNA, 21 nt, synthetic construct
  misc_feature 1..21: note = HBV-targeting guide sequence portion
  source 1..21: mol_type = other RNA
cggctcctctgccgatccata

SEQ ID NO: 8954 - RNA, 21 nt, synthetic construct
  misc_feature 1..21: note = HBV-targeting guide sequence portion
  source 1..21: mol_type = other RNA
cggctgcgagcaaaacaagcg

SEQ ID NO: 8955 - RNA, 21 nt, synthetic construct
  misc_feature 1..21: note = HBV-targeting guide sequence portion
  source 1..21: mol_type = other RNA
cgggaaacataccttgatagt

SEQ ID NO: 8956 - RNA, 21 nt, synthetic construct
  misc_feature 1..21: note = HBV-targeting guide sequence portion
  source 1..21: mol_type = other RNA
cgggaaagaatcccagaggat

SEQ ID NO: 8957 - RNA, 21 nt, synthetic construct
  misc_feature 1..21: note = HBV-targeting guide sequence portion
  source 1..21: mol_type = other RNA
cgggaccctgcagaacctgca

SEQ ID NO: 8958 - RNA, 21 nt, synthetic construct
  misc_feature 1..21: note = HBV-targeting guide sequence portion
  source 1..21: mol_type = other RNA
cgggacgtaaacaaaggacgt

SEQ ID NO: 8959 - RNA, 21 nt, synthetic construct
  misc_feature 1..21: note = HBV-targeting guide sequence portion
  source 1..21: mol_type = other RNA
cgggacgtcctttgtttacgt

SEQ ID NO: 8960 - RNA, 21 nt, synthetic construct
  misc_feature 1..21: note = HBV-targeting guide sequence portion
  source 1..21: mol_type = other RNA
cgggactgacaactctgttgt

SEQ ID NO: 8961 - RNA, 21 nt, synthetic construct
  misc_feature 1..21: note = HBV-targeting guide sequence portion
  source 1..21: mol_type = other RNA
cgggagaggacaacagagttg

SEQ ID NO: 8962 - RNA, 21 nt, synthetic construct
  misc_feature 1..21: note = HBV-targeting guide sequence portion
  source 1..21: mol_type = other RNA
cgggagttttctgaaacattc

SEQ ID NO: 8963 - RNA, 21 nt, synthetic construct
  misc_feature 1..21: note = HBV-targeting guide sequence portion
  source 1..21: mol_type = other RNA
cgggatgccttggagtctcct

SEQ ID NO: 8964 - RNA, 21 nt, synthetic construct
  misc_feature 1..21: note = HBV-targeting guide sequence portion
  source 1..21: mol_type = other RNA
cgggattcagcgccgacggga

SEQ ID NO: 8965 - RNA, 21 nt, synthetic construct
  misc_feature 1..21: note = HBV-targeting guide sequence portion
  source 1..21: mol_type = other RNA
cgggcctacaaactgttcaca

SEQ ID NO: 8966 - RNA, 21 nt, synthetic construct
  misc_feature 1..21: note = HBV-targeting guide sequence portion
  source 1..21: mol_type = other RNA
cgggctagggttcaccccacc

SEQ ID NO: 8967 - RNA, 21 nt, synthetic construct
  misc_feature 1..21: note = HBV-targeting guide sequence portion
  source 1..21: mol_type = other RNA
cgggctgaggcccactcccat

SEQ ID NO: 8968 - RNA, 21 nt, synthetic construct
  misc_feature 1..21: note = HBV-targeting guide sequence portion
  source 1..21: mol_type = other RNA
cggggagtccgcgtaaagaga

SEQ ID NO: 8969 - RNA, 21 nt, synthetic construct
  misc_feature 1..21: note = HBV-targeting guide sequence portion
  source 1..21: mol_type = other RNA
cggggatctcaatgttagtat

SEQ ID NO: 8970 - RNA, 21 nt, synthetic construct
  misc_feature 1..21: note = HBV-targeting guide sequence portion
  source 1..21: mol_type = other RNA
cggggcgcacctctctttacg

SEQ ID NO: 8971 - RNA, 21 nt, synthetic construct
  misc_feature 1..21: note = HBV-targeting guide sequence portion
  source 1..21: mol_type = other RNA
cggggctttattcttctactg

SEQ ID NO: 8972 - RNA, 21 nt, synthetic construct
  misc_feature 1..21: note = HBV-targeting guide sequence portion
  source 1..21: mol_type = other RNA
cggggtaaaggttcaggtatt

SEQ ID NO: 8973 - RNA, 21 nt, synthetic construct
  misc_feature 1..21: note = HBV-targeting guide sequence portion
  source 1..21: mol_type = other RNA
cggggtaggctgccgtcctga

SEQ ID NO: 8974 - RNA, 21 nt, synthetic construct
  misc_feature 1..21: note = HBV-targeting guide sequence portion
  source 1..21: mol_type = other RNA
cggggttttccttgttgacaa

SEQ ID NO: 8975 - RNA, 21 nt, synthetic construct
  misc_feature 1..21: note = HBV-targeting guide sequence portion
  source 1..21: mol_type = other RNA
cgggtgttttatataagagag

SEQ ID NO: 8976 - RNA, 21 nt, synthetic construct
  misc_feature 1..21: note = HBV-targeting guide sequence portion
  source 1..21: mol_type = other RNA
cggtagttccccctagaaaat

SEQ ID NO: 8977 - RNA, 21 nt, synthetic construct
  misc_feature 1..21: note = HBV-targeting guide sequence portion
  source 1..21: mol_type = other RNA
cggtataaagggactcaagat

SEQ ID NO: 8978 - RNA, 21 nt, synthetic construct
  misc_feature 1..21: note = HBV-targeting guide sequence portion
  source 1..21: mol_type = other RNA
cggtatctagaagatctcgta

SEQ ID NO: 8979 - RNA, 21 nt, synthetic construct
  misc_feature 1..21: note = HBV-targeting guide sequence portion
  source 1..21: mol_type = other RNA
cggtattgtgaggattcttgt

SEQ ID NO: 8980 - RNA, 21 nt, synthetic construct
  misc_feature 1..21: note = HBV-targeting guide sequence portion
  source 1..21: mol_type = other RNA
cggtccggcagatgagaaggc

SEQ ID NO: 8981 - RNA, 21 nt, synthetic construct
  misc_feature 1..21: note = HBV-targeting guide sequence portion
  source 1..21: mol_type = other RNA
cggtcctagagtatttggtgt

SEQ ID NO: 8982 - RNA, 21 nt, synthetic construct
  misc_feature 1..21: note = HBV-targeting guide sequence portion
  source 1..21: mol_type = other RNA
cggtcggaacggcaggcagag

SEQ ID NO: 8983 - RNA, 21 nt, synthetic construct
  misc_feature 1..21: note = HBV-targeting guide sequence portion
  source 1..21: mol_type = other RNA
cggtcgttgacattgcagaga

SEQ ID NO: 8984 - RNA, 21 nt, synthetic construct
  misc_feature 1..21: note = HBV-targeting guide sequence portion
  source 1..21: mol_type = other RNA
cggtctggagcaaacattctc

SEQ ID NO: 8985 - RNA, 21 nt, synthetic construct
  misc_feature 1..21: note = HBV-targeting guide sequence portion
  source 1..21: mol_type = other RNA
cggtggggtgaaccctagccc

SEQ ID NO: 8986 - RNA, 21 nt, synthetic construct
  misc_feature 1..21: note = HBV-targeting guide sequence portion
  source 1..21: mol_type = other RNA
cggtggtctccatgcgacgtg

SEQ ID NO: 8987 - RNA, 21 nt, synthetic construct
  misc_feature 1..21: note = HBV-targeting guide sequence portion
  source 1..21: mol_type = other RNA
cggttaacaggcctattgatt

SEQ ID NO: 8988 - RNA, 21 nt, synthetic construct
  misc_feature 1..21: note = HBV-targeting guide sequence portion
  source 1..21: mol_type = other RNA
cggttgaaattgattatgcct

SEQ ID NO: 8989 - RNA, 21 nt, synthetic construct
  misc_feature 1..21: note = HBV-targeting guide sequence portion
  source 1..21: mol_type = other RNA
cgtaaaatttcccaccttatg

SEQ ID NO: 8990 - RNA, 21 nt, synthetic construct
  misc_feature 1..21: note = HBV-targeting guide sequence portion
  source 1..21: mol_type = other RNA
cgtaaacaaaggacgtcccgc

SEQ ID NO: 8991 - RNA, 21 nt, synthetic construct
  misc_feature 1..21: note = HBV-targeting guide sequence portion
  source 1..21: mol_type = other RNA
cgtaaagagaggtgcgccccg

SEQ ID NO: 8992 - RNA, 21 nt, synthetic construct
  misc_feature 1..21: note = HBV-targeting guide sequence portion
  source 1..21: mol_type = other RNA
cgtacgagatcttctagatac

SEQ ID NO: 8993 - RNA, 21 nt, synthetic construct
  misc_feature 1..21: note = HBV-targeting guide sequence portion
  source 1..21: mol_type = other RNA
cgtacggaaggaaagaagtca

SEQ ID NO: 8994 - RNA, 21 nt, synthetic construct
  misc_feature 1..21: note = HBV-targeting guide sequence portion
  source 1..21: mol_type = other RNA
cgtagggctttcccccactgt

SEQ ID NO: 8995 - RNA, 21 nt, synthetic construct
  misc_feature 1..21: note = HBV-targeting guide sequence portion
  source 1..21: mol_type = other RNA
cgtcaatcttctcgaggattg

SEQ ID NO: 8996 - RNA, 21 nt, synthetic construct
  misc_feature 1..21: note = HBV-targeting guide sequence portion
  source 1..21: mol_type = other RNA
cgtcccgcgcaggatccagtt

SEQ ID NO: 8997 - RNA, 21 nt, synthetic construct
  misc_feature 1..21: note = HBV-targeting guide sequence portion
  source 1..21: mol_type = other RNA
cgtcccgtcggcgctgaatcc

SEQ ID NO: 8998 - RNA, 21 nt, synthetic construct
  misc_feature 1..21: note = HBV-targeting guide sequence portion
  source 1..21: mol_type = other RNA
cgtccgcgggattcagcgccg

SEQ ID NO: 8999 - RNA, 21 nt, synthetic construct
  misc_feature 1..21: note = HBV-targeting guide sequence portion
  source 1..21: mol_type = other RNA
cgtcctcttctctgcctgccg

SEQ ID NO: 9000 - RNA, 21 nt, synthetic construct
  misc_feature 1..21: note = HBV-targeting guide sequence portion
  source 1..21: mol_type = other RNA
cgtcctgactggcgattggta

SEQ ID NO: 9001 - RNA, 21 nt, synthetic construct
  misc_feature 1..21: note = HBV-targeting guide sequence portion
  source 1..21: mol_type = other RNA
cgtcctttgtttacgtcccgt

SEQ ID NO: 9002 - RNA, 21 nt, synthetic construct
  misc_feature 1..21: note = HBV-targeting guide sequence portion
  source 1..21: mol_type = other RNA
cgtcgcagaagatctcaatct

SEQ ID NO: 9003 - RNA, 21 nt, synthetic construct
  misc_feature 1..21: note = HBV-targeting guide sequence portion
  source 1..21: mol_type = other RNA
cgtcgcatggagaccaccgtg

SEQ ID NO: 9004 - RNA, 21 nt, synthetic construct
  misc_feature 1..21: note = HBV-targeting guide sequence portion
  source 1..21: mol_type = other RNA
cgtcggcgctgaatcccgcgg

SEQ ID NO: 9005 - RNA, 21 nt, synthetic construct
  misc_feature 1..21: note = HBV-targeting guide sequence portion
  source 1..21: mol_type = other RNA
cgtcgtctaacaacacaagtc

SEQ ID NO: 9006 - RNA, 21 nt, synthetic construct
  misc_feature 1..21: note = HBV-targeting guide sequence portion
  source 1..21: mol_type = other RNA
cgtctaacaacacaagtctcc

SEQ ID NO: 9007 - RNA, 21 nt, synthetic construct
  misc_feature 1..21: note = HBV-targeting guide sequence portion
  source 1..21: mol_type = other RNA
cgtctgcgaggcgagggagtt

SEQ ID NO: 9008 - RNA, 21 nt, synthetic construct
  misc_feature 1..21: note = HBV-targeting guide sequence portion
  source 1..21: mol_type = other RNA
cgtctggccagggatccttgt

SEQ ID NO: 9009 - RNA, 21 nt, synthetic construct
  misc_feature 1..21: note = HBV-targeting guide sequence portion
  source 1..21: mol_type = other RNA
cgtctgtcctctaattccagg

SEQ ID NO: 9010 - RNA, 21 nt, synthetic construct
  misc_feature 1..21: note = HBV-targeting guide sequence portion
  source 1..21: mol_type = other RNA
cgtctgtgccttctcatctgc

SEQ ID NO: 9011 - RNA, 21 nt, synthetic construct
  misc_feature 1..21: note = HBV-targeting guide sequence portion
  source 1..21: mol_type = other RNA
cgtcttttctcattaactgta

SEQ ID NO: 9012 - RNA, 21 nt, synthetic construct
  misc_feature 1..21: note = HBV-targeting guide sequence portion
  source 1..21: mol_type = other RNA
cgtgaacgcccaccaattctt

SEQ ID NO: 9013 - RNA, 21 nt, synthetic construct
  misc_feature 1..21: note = HBV-targeting guide sequence portion
  source 1..21: mol_type = other RNA
cgtgcagaggtgaagcgaagt

SEQ ID NO: 9014 - RNA, 21 nt, synthetic construct
  misc_feature 1..21: note = HBV-targeting guide sequence portion
  source 1..21: mol_type = other RNA
cgtgcaggttctgcagggtcc

SEQ ID NO: 9015 - RNA, 21 nt, synthetic construct
  misc_feature 1..21: note = HBV-targeting guide sequence portion
  source 1..21: mol_type = other RNA
cgtgcggtggggtgaacccta

SEQ ID NO: 9016 - RNA, 21 nt, synthetic construct
  misc_feature 1..21: note = HBV-targeting guide sequence portion
  source 1..21: mol_type = other RNA
cgtgctggtggttgatgatcc

SEQ ID NO: 9017 - RNA, 21 nt, synthetic construct
  misc_feature 1..21: note = HBV-targeting guide sequence portion
  source 1..21: mol_type = other RNA
cgtggaacctttccggctcct

SEQ ID NO: 9018 - RNA, 21 nt, synthetic construct
  misc_feature 1..21: note = HBV-targeting guide sequence portion
  source 1..21: mol_type = other RNA
cgtggtcggtcggaacggcag

SEQ ID NO: 9019 - RNA, 21 nt, synthetic construct
  misc_feature 1..21: note = HBV-targeting guide sequence portion
  source 1..21: mol_type = other RNA
cgtggtggacttctctcaatt

SEQ ID NO: 9020 - RNA, 21 nt, synthetic construct
  misc_feature 1..21: note = HBV-targeting guide sequence portion
  source 1..21: mol_type = other RNA
cgtgtgcacttcgcttcacct

SEQ ID NO: 9021 - RNA, 21 nt, synthetic construct
  misc_feature 1..21: note = HBV-targeting guide sequence portion
  source 1..21: mol_type = other RNA
cgtgtgtcttggccaaaattc

SEQ ID NO: 9022 - RNA, 21 nt, synthetic construct
  misc_feature 1..21: note = HBV-targeting guide sequence portion
  source 1..21: mol_type = other RNA
cgtgttacaggcggggttttc

SEQ ID NO: 9023 - RNA, 21 nt, synthetic construct
  misc_feature 1..21: note = HBV-targeting guide sequence portion
  source 1..21: mol_type = other RNA
cgttcacggtggtctccatgc

SEQ ID NO: 9024 - RNA, 21 nt, synthetic construct
  misc_feature 1..21: note = HBV-targeting guide sequence portion
  source 1..21: mol_type = other RNA
cgttcccatggctgctaggct

SEQ ID NO: 9025 - RNA, 21 nt, synthetic construct
  misc_feature 1..21: note = HBV-targeting guide sequence portion
  source 1..21: mol_type = other RNA
cgttccgaccgaccacggggc

SEQ ID NO: 9026 - RNA, 21 nt, synthetic construct
  misc_feature 1..21: note = HBV-targeting guide sequence portion
  source 1..21: mol_type = other RNA
cgttgacacactttccaatca

SEQ ID NO: 9027 - RNA, 21 nt, synthetic construct
  misc_feature 1..21: note = HBV-targeting guide sequence portion
  source 1..21: mol_type = other RNA
cgttgacattgcagagagtcc

SEQ ID NO: 9028 - RNA, 21 nt, synthetic construct
  misc_feature 1..21: note = HBV-targeting guide sequence portion
  source 1..21: mol_type = other RNA
cgttgccaggcaacggccagg

SEQ ID NO: 9029 - RNA, 21 nt, synthetic construct
  misc_feature 1..21: note = HBV-targeting guide sequence portion
  source 1..21: mol_type = other RNA
cgttgcctggcaacggggtaa

SEQ ID NO: 9030 - RNA, 21 nt, synthetic construct
  misc_feature 1..21: note = HBV-targeting guide sequence portion
  source 1..21: mol_type = other RNA
cgtttctcttccaaaagtaag

SEQ ID NO: 9031 - RNA, 21 nt, synthetic construct
  misc_feature 1..21: note = HBV-targeting guide sequence portion
  source 1..21: mol_type = other RNA
cgtttctcttggctcagttta

SEQ ID NO: 9032 - RNA, 21 nt, synthetic construct
  misc_feature 1..21: note = HBV-targeting guide sequence portion
  source 1..21: mol_type = other RNA
cgttttatcatcttcctcttc

SEQ ID NO: 9033 - RNA, 21 nt, synthetic construct
  misc_feature 1..21: note = HBV-targeting guide sequence portion
  source 1..21: mol_type = other RNA
cgtttttgccttctgacttct

SEQ ID NO: 9034 - RNA, 21 nt, synthetic construct
  misc_feature 1..21: note = HBV-targeting guide sequence portion
  source 1..21: mol_type = other RNA
ctaaagccacccaaggcacag

SEQ ID NO: 9035 - RNA, 21 nt, synthetic construct
  misc_feature 1..21: note = HBV-targeting guide sequence portion
  source 1..21: mol_type = other RNA
ctaaagttcagacaactattg

SEQ ID NO: 9036 - RNA, 21 nt, synthetic construct
  misc_feature 1..21: note = HBV-targeting guide sequence portion
  source 1..21: mol_type = other RNA
ctaaattagtacccacccagg

SEQ ID NO: 9037 - RNA, 21 nt, synthetic construct
  misc_feature 1..21: note = HBV-targeting guide sequence portion
  source 1..21: mol_type = other RNA
ctaaattcaccaaatacttgc

SEQ ID NO: 9038 - RNA, 21 nt, synthetic construct
  misc_feature 1..21: note = HBV-targeting guide sequence portion
  source 1..21: mol_type = other RNA
ctaacaaaacaaagagatggg

SEQ ID NO: 9039 - RNA, 21 nt, synthetic construct
  misc_feature 1..21: note = HBV-targeting guide sequence portion
  source 1..21: mol_type = other RNA
ctaacaacacaagtctccgga

SEQ ID NO: 9040 - RNA, 21 nt, synthetic construct
  misc_feature 1..21: note = HBV-targeting guide sequence portion
  source 1..21: mol_type = other RNA
ctaacattgagatccccgaga

SEQ ID NO: 9041 - RNA, 21 nt, synthetic construct
  misc_feature 1..21: note = HBV-targeting guide sequence portion
  source 1..21: mol_type = other RNA
ctaagcaggctttcacttttt

SEQ ID NO: 9042 - RNA, 21 nt, synthetic construct
  misc_feature 1..21: note = HBV-targeting guide sequence portion
  source 1..21: mol_type = other RNA
ctaatatacatctacaccaag

SEQ ID NO: 9043 - RNA, 21 nt, synthetic construct
  misc_feature 1..21: note = HBV-targeting guide sequence portion
  source 1..21: mol_type = other RNA
ctaatcatctcttgttcatgt

SEQ ID NO: 9044 - RNA, 21 nt, synthetic construct
  misc_feature 1..21: note = HBV-targeting guide sequence portion
  source 1..21: mol_type = other RNA
ctaatctcctcccccaactcc

SEQ ID NO: 9045 - RNA, 21 nt, synthetic construct
  misc_feature 1..21: note = HBV-targeting guide sequence portion
  source 1..21: mol_type = other RNA
ctaatgactctagctacctgg

SEQ ID NO: 9046 - RNA, 21 nt, synthetic construct
  misc_feature 1..21: note = HBV-targeting guide sequence portion
  source 1..21: mol_type = other RNA
ctaattccaggatcatcaacc

SEQ ID NO: 9047 - RNA, 21 nt, synthetic construct
  misc_feature 1..21: note = HBV-targeting guide sequence portion
  source 1..21: mol_type = other RNA
ctaatttagaagatcaagcat

SEQ ID NO: 9048 - RNA, 21 nt, synthetic construct
  misc_feature 1..21: note = HBV-targeting guide sequence portion
  source 1..21: mol_type = other RNA
ctacaaactgttcacattttt

SEQ ID NO: 9049 - RNA, 21 nt, synthetic construct
  misc_feature 1..21: note = HBV-targeting guide sequence portion
  source 1..21: mol_type = other RNA
ctacaccaagatattatcaaa

SEQ ID NO: 9050 - RNA, 21 nt, synthetic construct
  misc_feature 1..21: note = HBV-targeting guide sequence portion
  source 1..21: mol_type = other RNA
ctacagcatggggcagaatct

SEQ ID NO: 9051 - RNA, 21 nt, synthetic construct
  misc_feature 1..21: note = HBV-targeting guide sequence portion
  source 1..21: mol_type = other RNA
ctacagcctcctagtacaaag

SEQ ID NO: 9052 - RNA, 21 nt, synthetic construct
  misc_feature 1..21: note = HBV-targeting guide sequence portion
  source 1..21: mol_type = other RNA
ctaccaatcgccagtcaggac

SEQ ID NO: 9053 - RNA, 21 nt, synthetic construct
  misc_feature 1..21: note = HBV-targeting guide sequence portion
  source 1..21: mol_type = other RNA
ctaccccgctgtctccacctc

SEQ ID NO: 9054 - RNA, 21 nt, synthetic construct
  misc_feature 1..21: note = HBV-targeting guide sequence portion
  source 1..21: mol_type = other RNA
ctaccgtgtgtcttggccaaa

SEQ ID NO: 9055 - RNA, 21 nt, synthetic construct
  misc_feature 1..21: note = HBV-targeting guide sequence portion
  source 1..21: mol_type = other RNA
ctacctgggtgggtactaatt

SEQ ID NO: 9056 - RNA, 21 nt, synthetic construct
  misc_feature 1..21: note = HBV-targeting guide sequence portion
  source 1..21: mol_type = other RNA
ctaccttgttggcgtctggcc

SEQ ID NO: 9057 - RNA, 21 nt, synthetic construct
  misc_feature 1..21: note = HBV-targeting guide sequence portion
  source 1..21: mol_type = other RNA
ctacgaaccactgaacaaatg

SEQ ID NO: 9058 - RNA, 21 nt, synthetic construct
  misc_feature 1..21: note = HBV-targeting guide sequence portion
  source 1..21: mol_type = other RNA
ctactaggtccctagatgctt

SEQ ID NO: 9059 - RNA, 21 nt, synthetic construct
  misc_feature 1..21: note = HBV-targeting guide sequence portion
  source 1..21: mol_type = other RNA
ctactgcctctcacatatcgt

SEQ ID NO: 9060 - RNA, 21 nt, synthetic construct
  misc_feature 1..21: note = HBV-targeting guide sequence portion
  source 1..21: mol_type = other RNA
ctactgtacctgtctttaacc

SEQ ID NO: 9061 - RNA, 21 nt, synthetic construct
  misc_feature 1..21: note = HBV-targeting guide sequence portion
  source 1..21: mol_type = other RNA
ctactgtggagttactctcgt

SEQ ID NO: 9062 - RNA, 21 nt, synthetic construct
  misc_feature 1..21: note = HBV-targeting guide sequence portion
  source 1..21: mol_type = other RNA
ctactgttcaagcctccaagc

SEQ ID NO: 9063 - RNA, 21 nt, synthetic construct
  misc_feature 1..21: note = HBV-targeting guide sequence portion
  source 1..21: mol_type = other RNA
ctagaaaattgagagaagtcc

SEQ ID NO: 9064 - RNA, 21 nt, synthetic construct
  misc_feature 1..21: note = HBV-targeting guide sequence portion
  source 1..21: mol_type = other RNA
ctagaagaagaactccctcgc

SEQ ID NO: 9065 - RNA, 21 nt, synthetic construct
  misc_feature 1..21: note = HBV-targeting guide sequence portion
  source 1..21: mol_type = other RNA
ctagaagatctcgtacggaag

SEQ ID NO: 9066 - RNA, 21 nt, synthetic construct
  misc_feature 1..21: note = HBV-targeting guide sequence portion
  source 1..21: mol_type = other RNA
ctagacactatttacacactc

SEQ ID NO: 9067 - RNA, 21 nt, synthetic construct
  misc_feature 1..21: note = HBV-targeting guide sequence portion
  source 1..21: mol_type = other RNA
ctagactcgtggtggacttct

SEQ ID NO: 9068 - RNA, 21 nt, synthetic construct
  misc_feature 1..21: note = HBV-targeting guide sequence portion
  source 1..21: mol_type = other RNA
ctagactctgcggtattgtga

SEQ ID NO: 9069 - RNA, 21 nt, synthetic construct
  misc_feature 1..21: note = HBV-targeting guide sequence portion
  source 1..21: mol_type = other RNA
ctagagtatttggtgtctttt

SEQ ID NO: 9070 - RNA, 21 nt, synthetic construct
  misc_feature 1..21: note = HBV-targeting guide sequence portion
  source 1..21: mol_type = other RNA
ctagagtcattagttctcccc

SEQ ID NO: 9071 - RNA, 21 nt, synthetic construct
  misc_feature 1..21: note = HBV-targeting guide sequence portion
  source 1..21: mol_type = other RNA
ctagataccgccgcagctctg

SEQ ID NO: 9072 - RNA, 21 nt, synthetic construct
  misc_feature 1..21: note = HBV-targeting guide sequence portion
  source 1..21: mol_type = other RNA
ctagatgcttgatcttctaaa

SEQ ID NO: 9073 - RNA, 21 nt, synthetic construct
  misc_feature 1..21: note = HBV-targeting guide sequence portion
  source 1..21: mol_type = other RNA
ctagatgttctggataataag

SEQ ID NO: 9074 - RNA, 21 nt, synthetic construct
  misc_feature 1..21: note = HBV-targeting guide sequence portion
  source 1..21: mol_type = other RNA
ctagcagccatgggaacgatg

SEQ ID NO: 9075 - RNA, 21 nt, synthetic construct
  misc_feature 1..21: note = HBV-targeting guide sequence portion
  source 1..21: mol_type = other RNA
ctagcaggcataatcaatttc

SEQ ID NO: 9076 - RNA, 21 nt, synthetic construct
  misc_feature 1..21: note = HBV-targeting guide sequence portion
  source 1..21: mol_type = other RNA
ctagcccgaatgctccagctc

SEQ ID NO: 9077 - RNA, 21 nt, synthetic construct
  misc_feature 1..21: note = HBV-targeting guide sequence portion
  source 1..21: mol_type = other RNA
ctagccgcttgttttgctcgc

SEQ ID NO: 9078 - RNA, 21 nt, synthetic construct
  misc_feature 1..21: note = HBV-targeting guide sequence portion
  source 1..21: mol_type = other RNA
ctagctacctgggtgggtact

SEQ ID NO: 9079 - RNA, 21 nt, synthetic construct
  misc_feature 1..21: note = HBV-targeting guide sequence portion
  source 1..21: mol_type = other RNA
ctaggaatcctgatgtgatgt

SEQ ID NO: 9080 - RNA, 21 nt, synthetic construct
  misc_feature 1..21: note = HBV-targeting guide sequence portion
  source 1..21: mol_type = other RNA
ctaggacccctgctcgtgtta

SEQ ID NO: 9081 - RNA, 21 nt, synthetic construct
  misc_feature 1..21: note = HBV-targeting guide sequence portion
  source 1..21: mol_type = other RNA
ctaggaccgtttctcttccaa

SEQ ID NO: 9082 - RNA, 21 nt, synthetic construct
  misc_feature 1..21: note = HBV-targeting guide sequence portion
  source 1..21: mol_type = other RNA
ctaggaggctgtaggcataaa

SEQ ID NO: 9083 - RNA, 21 nt, synthetic construct
  misc_feature 1..21: note = HBV-targeting guide sequence portion
  source 1..21: mol_type = other RNA
ctaggagttccgcagtatgga

SEQ ID NO: 9084 - RNA, 21 nt, synthetic construct
  misc_feature 1..21: note = HBV-targeting guide sequence portion
  source 1..21: mol_type = other RNA
ctaggctgtgctgccaactgg

SEQ ID NO: 9085 - RNA, 21 nt, synthetic construct
  misc_feature 1..21: note = HBV-targeting guide sequence portion
  source 1..21: mol_type = other RNA
ctagggacctagtagtcagtt

SEQ ID NO: 9086 - RNA, 21 nt, synthetic construct
  misc_feature 1..21: note = HBV-targeting guide sequence portion
  source 1..21: mol_type = other RNA
ctaggggacctgcctcgtcgt

SEQ ID NO: 9087 - RNA, 21 nt, synthetic construct
  misc_feature 1..21: note = HBV-targeting guide sequence portion
  source 1..21: mol_type = other RNA
ctagggggaactaccgtgtgt

SEQ ID NO: 9088 - RNA, 21 nt, synthetic construct
  misc_feature 1..21: note = HBV-targeting guide sequence portion
  source 1..21: mol_type = other RNA
ctagggttcaccccaccgcac

SEQ ID NO: 9089 - RNA, 21 nt, synthetic construct
  misc_feature 1..21: note = HBV-targeting guide sequence portion
  source 1..21: mol_type = other RNA
ctaggtccctagatgcttgat

SEQ ID NO: 9090 - RNA, 21 nt, synthetic construct
  misc_feature 1..21: note = HBV-targeting guide sequence portion
  source 1..21: mol_type = other RNA
ctaggttttatcctaaattca

SEQ ID NO: 9091 - RNA, 21 nt, synthetic construct
  misc_feature 1..21: note = HBV-targeting guide sequence portion
  source 1..21: mol_type = other RNA
ctagtaaactgagccaagaga

SEQ ID NO: 9092 - RNA, 21 nt, synthetic construct
  misc_feature 1..21: note = HBV-targeting guide sequence portion
  source 1..21: mol_type = other RNA
ctagtacaaagatcattaatc

SEQ ID NO: 9093 - RNA, 21 nt, synthetic construct
  misc_feature 1..21: note = HBV-targeting guide sequence portion
  source 1..21: mol_type = other RNA
ctagtagtcagttatgtcaac

SEQ ID NO: 9094 - RNA, 21 nt, synthetic construct
  misc_feature 1..21: note = HBV-targeting guide sequence portion
  source 1..21: mol_type = other RNA
ctagtgccatttgttcagtgg

SEQ ID NO: 9095 - RNA, 21 nt, synthetic construct
  misc_feature 1..21: note = HBV-targeting guide sequence portion
  source 1..21: mol_type = other RNA
ctagttaatcattacttccaa

SEQ ID NO: 9096 - RNA, 21 nt, synthetic construct
  misc_feature 1..21: note = HBV-targeting guide sequence portion
  source 1..21: mol_type = other RNA
ctagtttggaagtaatgatta

SEQ ID NO: 9097 - RNA, 21 nt, synthetic construct
  misc_feature 1..21: note = HBV-targeting guide sequence portion
  source 1..21: mol_type = other RNA
ctataagctggaggagtgcga

SEQ ID NO: 9098 - RNA, 21 nt, synthetic construct
  misc_feature 1..21: note = HBV-targeting guide sequence portion
  source 1..21: mol_type = other RNA
ctatcaacacttccggagact

SEQ ID NO: 9099 - RNA, 21 nt, synthetic construct
  misc_feature 1..21: note = HBV-targeting guide sequence portion
  source 1..21: mol_type = other RNA
ctatcaaggtatgtttcccgt

SEQ ID NO: 9100 - RNA, 21 nt, synthetic construct
  misc_feature 1..21: note = HBV-targeting guide sequence portion
  source 1..21: mol_type = other RNA
ctatcctatcaacacttccgg

SEQ ID NO: 9101 - RNA, 21 nt, synthetic construct
  misc_feature 1..21: note = HBV-targeting guide sequence portion
  source 1..21: mol_type = other RNA
ctatgaccaagccccaaccag

SEQ ID NO: 9102 - RNA, 21 nt, synthetic construct
  misc_feature 1..21: note = HBV-targeting guide sequence portion
  source 1..21: mol_type = other RNA
ctatgcctcatcttcttgttg

SEQ ID NO: 9103 - RNA, 21 nt, synthetic construct
  misc_feature 1..21: note = HBV-targeting guide sequence portion
  source 1..21: mol_type = other RNA
ctatggaaggcgggtgtttta

SEQ ID NO: 9104 - RNA, 21 nt, synthetic construct
  misc_feature 1..21: note = HBV-targeting guide sequence portion
  source 1..21: mol_type = other RNA
ctatgggagtgggcctcagcc

SEQ ID NO: 9105 - RNA, 21 nt, synthetic construct
  misc_feature 1..21: note = HBV-targeting guide sequence portion
  source 1..21: mol_type = other RNA
ctatgtatccctcctgttgct

SEQ ID NO: 9106 - RNA, 21 nt, synthetic construct
  misc_feature 1..21: note = HBV-targeting guide sequence portion
  source 1..21: mol_type = other RNA
ctatgtcattgattgttgggg

SEQ ID NO: 9107 - RNA, 21 nt, synthetic construct
  misc_feature 1..21: note = HBV-targeting guide sequence portion
  source 1..21: mol_type = other RNA
ctatgtgttgacactctctta

SEQ ID NO: 9108 - RNA, 21 nt, synthetic construct
  misc_feature 1..21: note = HBV-targeting guide sequence portion
  source 1..21: mol_type = other RNA
ctattgattggaaagtgtgtc

SEQ ID NO: 9109 - RNA, 21 nt, synthetic construct
  misc_feature 1..21: note = HBV-targeting guide sequence portion
  source 1..21: mol_type = other RNA
ctattgtggtttcacatttct

SEQ ID NO: 9110 - RNA, 21 nt, synthetic construct
  misc_feature 1..21: note = HBV-targeting guide sequence portion
  source 1..21: mol_type = other RNA
ctatttacacactctatggaa

SEQ ID NO: 9111 - RNA, 21 nt, synthetic construct
  misc_feature 1..21: note = HBV-targeting guide sequence portion
  source 1..21: mol_type = other RNA
ctcaagatgctgtacagactt

SEQ ID NO: 9112 - RNA, 21 nt, synthetic construct
  misc_feature 1..21: note = HBV-targeting guide sequence portion
  source 1..21: mol_type = other RNA
ctcaaggaacctctatgtatc

SEQ ID NO: 9113 - RNA, 21 nt, synthetic construct
  misc_feature 1..21: note = HBV-targeting guide sequence portion
  source 1..21: mol_type = other RNA
ctcaaggtcggtcgttgacat

SEQ ID NO: 9114 - RNA, 21 nt, synthetic construct
  misc_feature 1..21: note = HBV-targeting guide sequence portion
  source 1..21: mol_type = other RNA
ctcaatcgccgcgtcgcagaa

SEQ ID NO: 9115 - RNA, 21 nt, synthetic construct
  misc_feature 1..21: note = HBV-targeting guide sequence portion
  source 1..21: mol_type = other RNA
ctcaatctcggggatctcaat

SEQ ID NO: 9116 - RNA, 21 nt, synthetic construct
  misc_feature 1..21: note = HBV-targeting guide sequence portion
  source 1..21: mol_type = other RNA
ctcaatgttagtatcccttgg

SEQ ID NO: 9117 - RNA, 21 nt, synthetic construct
  misc_feature 1..21: note = HBV-targeting guide sequence portion
  source 1..21: mol_type = other RNA
ctcaattttctagggggaact

SEQ ID NO: 9118 - RNA, 21 nt, synthetic construct
  misc_feature 1..21: note = HBV-targeting guide sequence portion
  source 1..21: mol_type = other RNA
ctcacaataccgcagagtcta

SEQ ID NO: 9119 - RNA, 21 nt, synthetic construct
  misc_feature 1..21: note = HBV-targeting guide sequence portion
  source 1..21: mol_type = other RNA
ctcacatatcgtcaatcttct

SEQ ID NO: 9120 - RNA, 21 nt, synthetic construct
  misc_feature 1..21: note = HBV-targeting guide sequence portion
  source 1..21: mol_type = other RNA
ctcaccaacctcctgtcctcc

SEQ ID NO: 9121 - RNA, 21 nt, synthetic construct
  misc_feature 1..21: note = HBV-targeting guide sequence portion
  source 1..21: mol_type = other RNA
ctcaccatactgcactcaggc

SEQ ID NO: 9122 - RNA, 21 nt, synthetic construct
  misc_feature 1..21: note = HBV-targeting guide sequence portion
  source 1..21: mol_type = other RNA
ctcactctgggatcttgcaga

SEQ ID NO: 9123 - RNA, 21 nt, synthetic construct
  misc_feature 1..21: note = HBV-targeting guide sequence portion
  source 1..21: mol_type = other RNA
ctcagaggtggagacagcggg

SEQ ID NO: 9124 - RNA, 21 nt, synthetic construct
  misc_feature 1..21: note = HBV-targeting guide sequence portion
  source 1..21: mol_type = other RNA
ctcagcccgtttctcttggct

SEQ ID NO: 9125 - RNA, 21 nt, synthetic construct
  misc_feature 1..21: note = HBV-targeting guide sequence portion
  source 1..21: mol_type = other RNA
ctcaggagactccaaggcatc

SEQ ID NO: 9126 - RNA, 21 nt, synthetic construct
  misc_feature 1..21: note = HBV-targeting guide sequence portion
  source 1..21: mol_type = other RNA
ctcaggcaagcaattctttgc

SEQ ID NO: 9127 - RNA, 21 nt, synthetic construct
  misc_feature 1..21: note = HBV-targeting guide sequence portion
  source 1..21: mol_type = other RNA
ctcaggctcagggcataatgc

SEQ ID NO: 9128 - RNA, 21 nt, synthetic construct
  misc_feature 1..21: note = HBV-targeting guide sequence portion
  source 1..21: mol_type = other RNA
ctcagggcataatgcaaacct

SEQ ID NO: 9129 - RNA, 21 nt, synthetic construct
  misc_feature 1..21: note = HBV-targeting guide sequence portion
  source 1..21: mol_type = other RNA
ctcagtttactagtgccattt

SEQ ID NO: 9130 - RNA, 21 nt, synthetic construct
  misc_feature 1..21: note = HBV-targeting guide sequence portion
  source 1..21: mol_type = other RNA
ctcataaggtgggaaatttta

SEQ ID NO: 9131 - RNA, 21 nt, synthetic construct
  misc_feature 1..21: note = HBV-targeting guide sequence portion
  source 1..21: mol_type = other RNA
ctcatatgggcctaaagttca

SEQ ID NO: 9132 - RNA, 21 nt, synthetic construct
  misc_feature 1..21: note = HBV-targeting guide sequence portion
  source 1..21: mol_type = other RNA
ctcatctgccggaccgtgtgc

SEQ ID NO: 9133 - RNA, 21 nt, synthetic construct
  misc_feature 1..21: note = HBV-targeting guide sequence portion
  source 1..21: mol_type = other RNA
ctcatcttcttgttggttctt

SEQ ID NO: 9134 - RNA, 21 nt, synthetic construct
  misc_feature 1..21: note = HBV-targeting guide sequence portion
  source 1..21: mol_type = other RNA
ctcattaactgtaagcgggcc

SEQ ID NO: 9135 - RNA, 21 nt, synthetic construct
  misc_feature 1..21: note = HBV-targeting guide sequence portion
  source 1..21: mol_type = other RNA
ctcattctgtgggtcaccata

SEQ ID NO: 9136 - RNA, 21 nt, synthetic construct
  misc_feature 1..21: note = HBV-targeting guide sequence portion
  source 1..21: mol_type = other RNA
ctcattggaaaacaccctctt

SEQ ID NO: 9137 - RNA, 21 nt, synthetic construct
  misc_feature 1..21: note = HBV-targeting guide sequence portion
  source 1..21: mol_type = other RNA
ctccaaaagacaccaaatact

SEQ ID NO: 9138 - RNA, 21 nt, synthetic construct
  misc_feature 1..21: note = HBV-targeting guide sequence portion
  source 1..21: mol_type = other RNA
ctccaaattctttatatgggt

SEQ ID NO: 9139 - RNA, 21 nt, synthetic construct
  misc_feature 1..21: note = HBV-targeting guide sequence portion
  source 1..21: mol_type = other RNA
ctccaacaatccagattggga

SEQ ID NO: 9140 - RNA, 21 nt, synthetic construct
  misc_feature 1..21: note = HBV-targeting guide sequence portion
  source 1..21: mol_type = other RNA
ctccaacttgtcctggttatc

SEQ ID NO: 9141 - RNA, 21 nt, synthetic construct
  misc_feature 1..21: note = HBV-targeting guide sequence portion
  source 1..21: mol_type = other RNA
ctccaagctgtgccttgggtg

SEQ ID NO: 9142 - RNA, 21 nt, synthetic construct
  misc_feature 1..21: note = HBV-targeting guide sequence portion
  source 1..21: mol_type = other RNA
ctccaaggcatcccgatacag

SEQ ID NO: 9143 - RNA, 21 nt, synthetic construct
  misc_feature 1..21: note = HBV-targeting guide sequence portion
  source 1..21: mol_type = other RNA
ctccaatcactcaccaacctc

SEQ ID NO: 9144 - RNA, 21 nt, synthetic construct
  misc_feature 1..21: note = HBV-targeting guide sequence portion
  source 1..21: mol_type = other RNA
ctccacaaccttccaccaaac

SEQ ID NO: 9145 - RNA, 21 nt, synthetic construct
  misc_feature 1..21: note = HBV-targeting guide sequence portion
  source 1..21: mol_type = other RNA
ctccacagtagctccaaattc

SEQ ID NO: 9146 - RNA, 21 nt, synthetic construct
  misc_feature 1..21: note = HBV-targeting guide sequence portion
  source 1..21: mol_type = other RNA
ctccaccccaaaaggcctccg

SEQ ID NO: 9147 - RNA, 21 nt, synthetic construct
  misc_feature 1..21: note = HBV-targeting guide sequence portion
  source 1..21: mol_type = other RNA
ctccacctctgagaaacactc

SEQ ID NO: 9148 - RNA, 21 nt, synthetic construct
  misc_feature 1..21: note = HBV-targeting guide sequence portion
  source 1..21: mol_type = other RNA
ctccagaccggctgcgagcaa

SEQ ID NO: 9149 - RNA, 21 nt, synthetic construct
  misc_feature 1..21: note = HBV-targeting guide sequence portion
  source 1..21: mol_type = other RNA
ctccagctcctaccttgttgg

SEQ ID NO: 9150 - RNA, 21 nt, synthetic construct
  misc_feature 1..21: note = HBV-targeting guide sequence portion
  source 1..21: mol_type = other RNA
ctccagcttatagaccaccaa

SEQ ID NO: 9151 - RNA, 21 nt, synthetic construct
  misc_feature 1..21: note = HBV-targeting guide sequence portion
  source 1..21: mol_type = other RNA
ctccagttcaggaacagtaaa

SEQ ID NO: 9152 - RNA, 21 nt, synthetic construct
  misc_feature 1..21: note = HBV-targeting guide sequence portion
  source 1..21: mol_type = other RNA
ctccatgcgacgtgcagaggt

SEQ ID NO: 9153 - RNA, 21 nt, synthetic construct
  misc_feature 1..21: note = HBV-targeting guide sequence portion
  source 1..21: mol_type = other RNA
ctccatgttcagcgcagggtc

SEQ ID NO: 9154 - RNA, 21 nt, synthetic construct
  misc_feature 1..21: note = HBV-targeting guide sequence portion
  source 1..21: mol_type = other RNA
ctcccagtctttaaacaaaca

SEQ ID NO: 9155 - RNA, 21 nt, synthetic construct
  misc_feature 1..21: note = HBV-targeting guide sequence portion
  source 1..21: mol_type = other RNA
ctcccataggaattttccgaa

SEQ ID NO: 9156 - RNA, 21 nt, synthetic construct
  misc_feature 1..21: note = HBV-targeting guide sequence portion
  source 1..21: mol_type = other RNA
ctccccagcaaagaattgctt

SEQ ID NO: 9157 - RNA, 21 nt, synthetic construct
  misc_feature 1..21: note = HBV-targeting guide sequence portion
  source 1..21: mol_type = other RNA
ctcccccaactcctcccagtc

SEQ ID NO: 9158 - RNA, 21 nt, synthetic construct
  misc_feature 1..21: note = HBV-targeting guide sequence portion
  source 1..21: mol_type = other RNA
ctccccgtctgtgccttctca

SEQ ID NO: 9159 - RNA, 21 nt, synthetic construct
  misc_feature 1..21: note = HBV-targeting guide sequence portion
  source 1..21: mol_type = other RNA
ctcccgcaaatatacatcgtt

SEQ ID NO: 9160 - RNA, 21 nt, synthetic construct
  misc_feature 1..21: note = HBV-targeting guide sequence portion
  source 1..21: mol_type = other RNA
ctcccggttaacaggcctatt

SEQ ID NO: 9161 - RNA, 21 nt, synthetic construct
  misc_feature 1..21: note = HBV-targeting guide sequence portion
  source 1..21: mol_type = other RNA
ctccctcgcctcgcagacgaa

SEQ ID NO: 9162 - RNA, 21 nt, synthetic construct
  misc_feature 1..21: note = HBV-targeting guide sequence portion
  source 1..21: mol_type = other RNA
ctccctgctggtggctccagt

SEQ ID NO: 9163 - RNA, 21 nt, synthetic construct
  misc_feature 1..21: note = HBV-targeting guide sequence portion
  source 1..21: mol_type = other RNA
ctccggaagtgttgataggat

SEQ ID NO: 9164 - RNA, 21 nt, synthetic construct
  misc_feature 1..21: note = HBV-targeting guide sequence portion
  source 1..21: mol_type = other RNA
ctccgtgcggtggggtgaacc

SEQ ID NO: 9165 - RNA, 21 nt, synthetic construct
  misc_feature 1..21: note = HBV-targeting guide sequence portion
  source 1..21: mol_type = other RNA
ctcctaccttgttggcgtctg

SEQ ID NO: 9166 - RNA, 21 nt, synthetic construct
  misc_feature 1..21: note = HBV-targeting guide sequence portion
  source 1..21: mol_type = other RNA
ctcctagccgcttgttttgct

SEQ ID NO: 9167 - RNA, 21 nt, synthetic construct
  misc_feature 1..21: note = HBV-targeting guide sequence portion
  source 1..21: mol_type = other RNA
ctcctagtacaaagatcatta

SEQ ID NO: 9168 - RNA, 21 nt, synthetic construct
  misc_feature 1..21: note = HBV-targeting guide sequence portion
  source 1..21: mol_type = other RNA
ctcctccagcttatagaccac

SEQ ID NO: 9169 - RNA, 21 nt, synthetic construct
  misc_feature 1..21: note = HBV-targeting guide sequence portion
  source 1..21: mol_type = other RNA
ctcctcccagtctttaaacaa

SEQ ID NO: 9170 - RNA, 21 nt, synthetic construct
  misc_feature 1..21: note = HBV-targeting guide sequence portion
  source 1..21: mol_type = other RNA
ctcctcccccaactcctccca

SEQ ID NO: 9171 - RNA, 21 nt, synthetic construct
  misc_feature 1..21: note = HBV-targeting guide sequence portion
  source 1..21: mol_type = other RNA
ctcctctgccgatccatactg

SEQ ID NO: 9172 - RNA, 21 nt, synthetic construct
  misc_feature 1..21: note = HBV-targeting guide sequence portion
  source 1..21: mol_type = other RNA
ctcctgagcattgttcacctc

SEQ ID NO: 9173 - RNA, 21 nt, synthetic construct
  misc_feature 1..21: note = HBV-targeting guide sequence portion
  source 1..21: mol_type = other RNA
ctcctgcctctaccaatcgcc

SEQ ID NO: 9174 - RNA, 21 nt, synthetic construct
  misc_feature 1..21: note = HBV-targeting guide sequence portion
  source 1..21: mol_type = other RNA
ctcctgctcaaggaacctcta

SEQ ID NO: 9175 - RNA, 21 nt, synthetic construct
  misc_feature 1..21: note = HBV-targeting guide sequence portion
  source 1..21: mol_type = other RNA
ctcctgtcctccaacttgtcc

SEQ ID NO: 9176 - RNA, 21 nt, synthetic construct
  misc_feature 1..21: note = HBV-targeting guide sequence portion
  source 1..21: mol_type = other RNA
ctcctgttgctgtacaaaacc

SEQ ID NO: 9177 - RNA, 21 nt, synthetic construct
  misc_feature 1..21: note = HBV-targeting guide sequence portion
  source 1..21: mol_type = other RNA
ctcgagaagattgacgatatg

SEQ ID NO: 9178 - RNA, 21 nt, synthetic construct
  misc_feature 1..21: note = HBV-targeting guide sequence portion
  source 1..21: mol_type = other RNA
ctcgagatgggtcgtccgcgg

SEQ ID NO: 9179 - RNA, 21 nt, synthetic construct
  misc_feature 1..21: note = HBV-targeting guide sequence portion
  source 1..21: mol_type = other RNA
ctcgaggattggggaccctgc

SEQ ID NO: 9180 - RNA, 21 nt, synthetic construct
  misc_feature 1..21: note = HBV-targeting guide sequence portion
  source 1..21: mol_type = other RNA
ctcgaggccgcttggggccct

SEQ ID NO: 9181 - RNA, 21 nt, synthetic construct
  misc_feature 1..21: note = HBV-targeting guide sequence portion
  source 1..21: mol_type = other RNA
ctcgcagacgaagatctcaat

SEQ ID NO: 9182 - RNA, 21 nt, synthetic construct
  misc_feature 1..21: note = HBV-targeting guide sequence portion
  source 1..21: mol_type = other RNA
ctcgcagccggtctggagcaa

SEQ ID NO: 9183 - RNA, 21 nt, synthetic construct
  misc_feature 1..21: note = HBV-targeting guide sequence portion
  source 1..21: mol_type = other RNA
ctcgcctcgcagacgaagatc

SEQ ID NO: 9184 - RNA, 21 nt, synthetic construct
  misc_feature 1..21: note = HBV-targeting guide sequence portion
  source 1..21: mol_type = other RNA
ctcgggactgacaactctgtt

SEQ ID NO: 9185 - RNA, 21 nt, synthetic construct
  misc_feature 1..21: note = HBV-targeting guide sequence portion
  source 1..21: mol_type = other RNA
ctcggggatctcaatgttagt

SEQ ID NO: 9186 - RNA, 21 nt, synthetic construct
  misc_feature 1..21: note = HBV-targeting guide sequence portion
  source 1..21: mol_type = other RNA
ctcgtacggaaggaaagaagt

SEQ ID NO: 9187 - RNA, 21 nt, synthetic construct
  misc_feature 1..21: note = HBV-targeting guide sequence portion
  source 1..21: mol_type = other RNA
ctcgtcgtctaacaacacaag

SEQ ID NO: 9188 - RNA, 21 nt, synthetic construct
  misc_feature 1..21: note = HBV-targeting guide sequence portion
  source 1..21: mol_type = other RNA
ctcgtggtggacttctctcaa

SEQ ID NO: 9189 - RNA, 21 nt, synthetic construct
  misc_feature 1..21: note = HBV-targeting guide sequence portion
  source 1..21: mol_type = other RNA
ctcgtgttacaggcggggttt

SEQ ID NO: 9190 - RNA, 21 nt, synthetic construct
  misc_feature 1..21: note = HBV-targeting guide sequence portion
  source 1..21: mol_type = other RNA
ctcgtttttgccttctgactt

SEQ ID NO: 9191 - RNA, 21 nt, synthetic construct
  misc_feature 1..21: note = HBV-targeting guide sequence portion
  source 1..21: mol_type = other RNA
ctctaattccaggatcatcaa

SEQ ID NO: 9192 - RNA, 21 nt, synthetic construct
  misc_feature 1..21: note = HBV-targeting guide sequence portion
  source 1..21: mol_type = other RNA
ctctaccaatcgccagtcagg

SEQ ID NO: 9193 - RNA, 21 nt, synthetic construct
  misc_feature 1..21: note = HBV-targeting guide sequence portion
  source 1..21: mol_type = other RNA
ctctagctacctgggtgggta

SEQ ID NO: 9194 - RNA, 21 nt, synthetic construct
  misc_feature 1..21: note = HBV-targeting guide sequence portion
  source 1..21: mol_type = other RNA
ctctaggaccgtttctcttcc

SEQ ID NO: 9195 - RNA, 21 nt, synthetic construct
  misc_feature 1..21: note = HBV-targeting guide sequence portion
  source 1..21: mol_type = other RNA
ctctatggaaggcgggtgttt

SEQ ID NO: 9196 - RNA, 21 nt, synthetic construct
  misc_feature 1..21: note = HBV-targeting guide sequence portion
  source 1..21: mol_type = other RNA
ctctatgtatccctcctgttg

SEQ ID NO: 9197 - RNA, 21 nt, synthetic construct
  misc_feature 1..21: note = HBV-targeting guide sequence portion
  source 1..21: mol_type = other RNA
ctctcaattttctagggggaa

SEQ ID NO: 9198 - RNA, 21 nt, synthetic construct
  misc_feature 1..21: note = HBV-targeting guide sequence portion
  source 1..21: mol_type = other RNA
ctctcacatatcgtcaatctt

SEQ ID NO: 9199 - RNA, 21 nt, synthetic construct
  misc_feature 1..21: note = HBV-targeting guide sequence portion
  source 1..21: mol_type = other RNA
ctctcactctgggatcttgca

SEQ ID NO: 9200 - RNA, 21 nt, synthetic construct
  misc_feature 1..21: note = HBV-targeting guide sequence portion
  source 1..21: mol_type = other RNA
ctctcccgcaaatatacatcg

SEQ ID NO: 9201 - RNA, 21 nt, synthetic construct
  misc_feature 1..21: note = HBV-targeting guide sequence portion
  source 1..21: mol_type = other RNA
ctctcgtttttgccttctgac

SEQ ID NO: 9202 - RNA, 21 nt, synthetic construct
  misc_feature 1..21: note = HBV-targeting guide sequence portion
  source 1..21: mol_type = other RNA
ctctctgcaatgtcaacgacc

SEQ ID NO: 9203 - RNA, 21 nt, synthetic construct
  misc_feature 1..21: note = HBV-targeting guide sequence portion
  source 1..21: mol_type = other RNA
ctctcttatataaaacacccg

SEQ ID NO: 9204 - RNA, 21 nt, synthetic construct
  misc_feature 1..21: note = HBV-targeting guide sequence portion
  source 1..21: mol_type = other RNA
ctctctttacgcggactcccc

SEQ ID NO: 9205 - RNA, 21 nt, synthetic construct
  misc_feature 1..21: note = HBV-targeting guide sequence portion
  source 1..21: mol_type = other RNA
ctctgaaggctgggtccaact

SEQ ID NO: 9206 - RNA, 21 nt, synthetic construct
  misc_feature 1..21: note = HBV-targeting guide sequence portion
  source 1..21: mol_type = other RNA
ctctgagaaacactcatcctc

SEQ ID NO: 9207 - RNA, 21 nt, synthetic construct
  misc_feature 1..21: note = HBV-targeting guide sequence portion
  source 1..21: mol_type = other RNA
ctctgcaagatcccagagtga

SEQ ID NO: 9208 - RNA, 21 nt, synthetic construct
  misc_feature 1..21: note = HBV-targeting guide sequence portion
  source 1..21: mol_type = other RNA
ctctgcaatgtcaacgaccga

SEQ ID NO: 9209 - RNA, 21 nt, synthetic construct
  misc_feature 1..21: note = HBV-targeting guide sequence portion
  source 1..21: mol_type = other RNA
ctctgcacgtcgcatggagac

SEQ ID NO: 9210 - RNA, 21 nt, synthetic construct
  misc_feature 1..21: note = HBV-targeting guide sequence portion
  source 1..21: mol_type = other RNA
ctctgccgatccatactgcgg

SEQ ID NO: 9211 - RNA, 21 nt, synthetic construct
  misc_feature 1..21: note = HBV-targeting guide sequence portion
  source 1..21: mol_type = other RNA
ctctgcctaatcatctcttgt

SEQ ID NO: 9212 - RNA, 21 nt, synthetic construct
  misc_feature 1..21: note = HBV-targeting guide sequence portion
  source 1..21: mol_type = other RNA
ctctgcctgccgttccgaccg

SEQ ID NO: 9213 - RNA, 21 nt, synthetic construct
  misc_feature 1..21: note = HBV-targeting guide sequence portion
  source 1..21: mol_type = other RNA
ctctgcggtattgtgaggatt

SEQ ID NO: 9214 - RNA, 21 nt, synthetic construct
  misc_feature 1..21: note = HBV-targeting guide sequence portion
  source 1..21: mol_type = other RNA
ctctgggatcttgcagagttt

SEQ ID NO: 9215 - RNA, 21 nt, synthetic construct
  misc_feature 1..21: note = HBV-targeting guide sequence portion
  source 1..21: mol_type = other RNA
ctctgggattctttcccgacc

SEQ ID NO: 9216 - RNA, 21 nt, synthetic construct
  misc_feature 1..21: note = HBV-targeting guide sequence portion
  source 1..21: mol_type = other RNA
ctctgtatcgggatgccttgg

SEQ ID NO: 9217 - RNA, 21 nt, synthetic construct
  misc_feature 1..21: note = HBV-targeting guide sequence portion
  source 1..21: mol_type = other RNA
ctctgttgtcctctcccgcaa

SEQ ID NO: 9218 - RNA, 21 nt, synthetic construct
  misc_feature 1..21: note = HBV-targeting guide sequence portion
  source 1..21: mol_type = other RNA
ctcttaatttcatgggctatg

SEQ ID NO: 9219 - RNA, 21 nt, synthetic construct
  misc_feature 1..21: note = HBV-targeting guide sequence portion
  source 1..21: mol_type = other RNA
ctcttatataaaacacccgcc

SEQ ID NO: 9220 - RNA, 21 nt, synthetic construct
  misc_feature 1..21: note = HBV-targeting guide sequence portion
  source 1..21: mol_type = other RNA
ctcttatgtaagaccttgggc

SEQ ID NO: 9221 - RNA, 21 nt, synthetic construct
  misc_feature 1..21: note = HBV-targeting guide sequence portion
  source 1..21: mol_type = other RNA
ctcttcatcctgctgctatgc

SEQ ID NO: 9222 - RNA, 21 nt, synthetic construct
  misc_feature 1..21: note = HBV-targeting guide sequence portion
  source 1..21: mol_type = other RNA
ctcttccaaaagtaagacaag

SEQ ID NO: 9223 - RNA, 21 nt, synthetic construct
  misc_feature 1..21: note = HBV-targeting guide sequence portion
  source 1..21: mol_type = other RNA
ctcttctctgcctgccgttcc

SEQ ID NO: 9224 - RNA, 21 nt, synthetic construct
  misc_feature 1..21: note = HBV-targeting guide sequence portion
  source 1..21: mol_type = other RNA
ctcttggactctctgcaatgt

SEQ ID NO: 9225 - RNA, 21 nt, synthetic construct
  misc_feature 1..21: note = HBV-targeting guide sequence portion
  source 1..21: mol_type = other RNA
ctcttggctcagtttactagt

SEQ ID NO: 9226 - RNA, 21 nt, synthetic construct
  misc_feature 1..21: note = HBV-targeting guide sequence portion
  source 1..21: mol_type = other RNA
ctcttgttcatgtcctactgt

SEQ ID NO: 9227 - RNA, 21 nt, synthetic construct
  misc_feature 1..21: note = HBV-targeting guide sequence portion
  source 1..21: mol_type = other RNA
ctcttgttcccaagaatatgg

SEQ ID NO: 9228 - RNA, 21 nt, synthetic construct
  misc_feature 1..21: note = HBV-targeting guide sequence portion
  source 1..21: mol_type = other RNA
ctctttacgcggactccccgt

SEQ ID NO: 9229 - RNA, 21 nt, synthetic construct
  misc_feature 1..21: note = HBV-targeting guide sequence portion
  source 1..21: mol_type = other RNA
ctctttgttttgttagggttt

SEQ ID NO: 9230 - RNA, 21 nt, synthetic construct
  misc_feature 1..21: note = HBV-targeting guide sequence portion
  source 1..21: mol_type = other RNA
ctcttttcctaatatacatct

SEQ ID NO: 9231 - RNA, 21 nt, synthetic construct
  misc_feature 1..21: note = HBV-targeting guide sequence portion
  source 1..21: mol_type = other RNA
ctgaaacattctttgattttg

SEQ ID NO: 9232 - RNA, 21 nt, synthetic construct
  misc_feature 1..21: note = HBV-targeting guide sequence portion
  source 1..21: mol_type = other RNA
ctgaaagccaaacagtggggg

SEQ ID NO: 9233 - RNA, 21 nt, synthetic construct
  misc_feature 1..21: note = HBV-targeting guide sequence portion
  source 1..21: mol_type = other RNA
ctgaacaaatggcactagtaa

SEQ ID NO: 9234 - RNA, 21 nt, synthetic construct
  misc_feature 1..21: note = HBV-targeting guide sequence portion
  source 1..21: mol_type = other RNA
ctgaacatggagaacatcaca

SEQ ID NO: 9235 - RNA, 21 nt, synthetic construct
  misc_feature 1..21: note = HBV-targeting guide sequence portion
  source 1..21: mol_type = other RNA
ctgaacctttaccccgttgcc

SEQ ID NO: 9236 - RNA, 21 nt, synthetic construct
  misc_feature 1..21: note = HBV-targeting guide sequence portion
  source 1..21: mol_type = other RNA
ctgaactggagccaccagcag

SEQ ID NO: 9237 - RNA, 21 nt, synthetic construct
  misc_feature 1..21: note = HBV-targeting guide sequence portion
  source 1..21: mol_type = other RNA
ctgaactttaggcccatatga

SEQ ID NO: 9238 - RNA, 21 nt, synthetic construct
  misc_feature 1..21: note = HBV-targeting guide sequence portion
  source 1..21: mol_type = other RNA
ctgaaggctgggtccaactgg

SEQ ID NO: 9239 - RNA, 21 nt, synthetic construct
  misc_feature 1..21: note = HBV-targeting guide sequence portion
  source 1..21: mol_type = other RNA
ctgaatcccgcggacgaccca

SEQ ID NO: 9240 - RNA, 21 nt, synthetic construct
  misc_feature 1..21: note = HBV-targeting guide sequence portion
  source 1..21: mol_type = other RNA
ctgacaactctgttgtcctct

SEQ ID NO: 9241 - RNA, 21 nt, synthetic construct
  misc_feature 1..21: note = HBV-targeting guide sequence portion
  source 1..21: mol_type = other RNA
ctgactactaggtccctagat

SEQ ID NO: 9242 - RNA, 21 nt, synthetic construct
  misc_feature 1..21: note = HBV-targeting guide sequence portion
  source 1..21: mol_type = other RNA
ctgactggcgattggtagagg

SEQ ID NO: 9243 - RNA, 21 nt, synthetic construct
  misc_feature 1..21: note = HBV-targeting guide sequence portion
  source 1..21: mol_type = other RNA
ctgacttctttccttccgtac

SEQ ID NO: 9244 - RNA, 21 nt, synthetic construct
  misc_feature 1..21: note = HBV-targeting guide sequence portion
  source 1..21: mol_type = other RNA
ctgagaaacactcatcctcag

SEQ ID NO: 9245 - RNA, 21 nt, synthetic construct
  misc_feature 1..21: note = HBV-targeting guide sequence portion
  source 1..21: mol_type = other RNA
ctgagcattgttcacctcacc

SEQ ID NO: 9246 - RNA, 21 nt, synthetic construct
  misc_feature 1..21: note = HBV-targeting guide sequence portion
  source 1..21: mol_type = other RNA
ctgagccaagagaaacgggct

SEQ ID NO: 9247 - RNA, 21 nt, synthetic construct
  misc_feature 1..21: note = HBV-targeting guide sequence portion
  source 1..21: mol_type = other RNA
ctgagcctgagggctccaccc

SEQ ID NO: 9248 - RNA, 21 nt, synthetic construct
  misc_feature 1..21: note = HBV-targeting guide sequence portion
  source 1..21: mol_type = other RNA
ctgaggatgagtgtttctcag

SEQ ID NO: 9249 - RNA, 21 nt, synthetic construct
  misc_feature 1..21: note = HBV-targeting guide sequence portion
  source 1..21: mol_type = other RNA
ctgaggcccactcccatagga

SEQ ID NO: 9250 - RNA, 21 nt, synthetic construct
  misc_feature 1..21: note = HBV-targeting guide sequence portion
  source 1..21: mol_type = other RNA
ctgagggctccaccccaaaag

SEQ ID NO: 9251 - RNA, 21 nt, synthetic construct
  misc_feature 1..21: note = HBV-targeting guide sequence portion
  source 1..21: mol_type = other RNA
ctgagtgcagtatggtgaggt

SEQ ID NO: 9252 - RNA, 21 nt, synthetic construct
  misc_feature 1..21: note = HBV-targeting guide sequence portion
  source 1..21: mol_type = other RNA
ctgatgcaacccccactggtt

SEQ ID NO: 9253 - RNA, 21 nt, synthetic construct
  misc_feature 1..21: note = HBV-targeting guide sequence portion
  source 1..21: mol_type = other RNA
ctgatggcctatgaccaagcc

SEQ ID NO: 9254 - RNA, 21 nt, synthetic construct
  misc_feature 1..21: note = HBV-targeting guide sequence portion
  source 1..21: mol_type = other RNA
ctgatgtgatgttctccatgt

SEQ ID NO: 9255 - RNA, 21 nt, synthetic construct
  misc_feature 1..21: note = HBV-targeting guide sequence portion
  source 1..21: mol_type = other RNA
ctgcaagatcccagagtgaga

SEQ ID NO: 9256 - RNA, 21 nt, synthetic construct
  misc_feature 1..21: note = HBV-targeting guide sequence portion
  source 1..21: mol_type = other RNA
ctgcaatgtcaacgaccgacc

SEQ ID NO: 9257 - RNA, 21 nt, synthetic construct
  misc_feature 1..21: note = HBV-targeting guide sequence portion
  source 1..21: mol_type = other RNA
ctgcacctgtattcccatccc

SEQ ID NO: 9258 - RNA, 21 nt, synthetic construct
  misc_feature 1..21: note = HBV-targeting guide sequence portion
  source 1..21: mol_type = other RNA
ctgcacgactcctgctcaagg

SEQ ID NO: 9259 - RNA, 21 nt, synthetic construct
  misc_feature 1..21: note = HBV-targeting guide sequence portion
  source 1..21: mol_type = other RNA
ctgcacgtcgcatggagacca

SEQ ID NO: 9260 - RNA, 21 nt, synthetic construct
  misc_feature 1..21: note = HBV-targeting guide sequence portion
  source 1..21: mol_type = other RNA
ctgcactcaggcaagcaattc

SEQ ID NO: 9261 - RNA, 21 nt, synthetic construct
  misc_feature 1..21: note = HBV-targeting guide sequence portion
  source 1..21: mol_type = other RNA
ctgcagaacctgcacgactcc

SEQ ID NO: 9262 - RNA, 21 nt, synthetic construct
  misc_feature 1..21: note = HBV-targeting guide sequence portion
  source 1..21: mol_type = other RNA
ctgcagggtcccgtgctggtg

SEQ ID NO: 9263 - RNA, 21 nt, synthetic construct
  misc_feature 1..21: note = HBV-targeting guide sequence portion
  source 1..21: mol_type = other RNA
ctgcatggcctgaggatgagt

SEQ ID NO: 9264 - RNA, 21 nt, synthetic construct
  misc_feature 1..21: note = HBV-targeting guide sequence portion
  source 1..21: mol_type = other RNA
ctgccaactggatcctgcgcg

SEQ ID NO: 9265 - RNA, 21 nt, synthetic construct
  misc_feature 1..21: note = HBV-targeting guide sequence portion
  source 1..21: mol_type = other RNA
ctgccccatgctgtagctctt

SEQ ID NO: 9266 - RNA, 21 nt, synthetic construct
  misc_feature 1..21: note = HBV-targeting guide sequence portion
  source 1..21: mol_type = other RNA
ctgccccttttacacaatgtg

SEQ ID NO: 9267 - RNA, 21 nt, synthetic construct
  misc_feature 1..21: note = HBV-targeting guide sequence portion
  source 1..21: mol_type = other RNA
ctgccgatccatactgcggaa

SEQ ID NO: 9268 - RNA, 21 nt, synthetic construct
  misc_feature 1..21: note = HBV-targeting guide sequence portion
  source 1..21: mol_type = other RNA
ctgccggaccgtgtgcacttc

SEQ ID NO: 9269 - RNA, 21 nt, synthetic construct
  misc_feature 1..21: note = HBV-targeting guide sequence portion
  source 1..21: mol_type = other RNA
ctgccgtcctgactggcgatt

SEQ ID NO: 9270 - RNA, 21 nt, synthetic construct
  misc_feature 1..21: note = HBV-targeting guide sequence portion
  source 1..21: mol_type = other RNA
ctgccgttccgaccgaccacg

SEQ ID NO: 9271 - RNA, 21 nt, synthetic construct
  misc_feature 1..21: note = HBV-targeting guide sequence portion
  source 1..21: mol_type = other RNA
ctgcctaatcatctcttgttc

SEQ ID NO: 9272 - RNA, 21 nt, synthetic construct
  misc_feature 1..21: note = HBV-targeting guide sequence portion
  source 1..21: mol_type = other RNA
ctgcctcgtcgtctaacaaca

SEQ ID NO: 9273 - RNA, 21 nt, synthetic construct
  misc_feature 1..21: note = HBV-targeting guide sequence portion
  source 1..21: mol_type = other RNA
ctgcctctaccaatcgccagt

SEQ ID NO: 9274 - RNA, 21 nt, synthetic construct
  misc_feature 1..21: note = HBV-targeting guide sequence portion
  source 1..21: mol_type = other RNA
ctgcctctcacatatcgtcaa

SEQ ID NO: 9275 - RNA, 21 nt, synthetic construct
  misc_feature 1..21: note = HBV-targeting guide sequence portion
  source 1..21: mol_type = other RNA
ctgcctgccgttccgaccgac

SEQ ID NO: 9276 - RNA, 21 nt, synthetic construct
  misc_feature 1..21: note = HBV-targeting guide sequence portion
  source 1..21: mol_type = other RNA
ctgcgaattttggccaagaca

SEQ ID NO: 9277 - RNA, 21 nt, synthetic construct
  misc_feature 1..21: note = HBV-targeting guide sequence portion
  source 1..21: mol_type = other RNA
ctgcgacgcggcgattgagat

SEQ ID NO: 9278 - RNA, 21 nt, synthetic construct
  misc_feature 1..21: note = HBV-targeting guide sequence portion
  source 1..21: mol_type = other RNA
ctgcgagcaaaacaagcggct

SEQ ID NO: 9279 - RNA, 21 nt, synthetic construct
  misc_feature 1..21: note = HBV-targeting guide sequence portion
  source 1..21: mol_type = other RNA
ctgcgaggcgagggagttctt

SEQ ID NO: 9280 - RNA, 21 nt, synthetic construct
  misc_feature 1..21: note = HBV-targeting guide sequence portion
  source 1..21: mol_type = other RNA
ctgcgcaccagcaccatgcaa

SEQ ID NO: 9281 - RNA, 21 nt, synthetic construct
  misc_feature 1..21: note = HBV-targeting guide sequence portion
  source 1..21: mol_type = other RNA
ctgcgcgggacgtcctttgtt

SEQ ID NO: 9282 - RNA, 21 nt, synthetic construct
  misc_feature 1..21: note = HBV-targeting guide sequence portion
  source 1..21: mol_type = other RNA
ctgcgctgaacatggagaaca

SEQ ID NO: 9283 - RNA, 21 nt, synthetic construct
  misc_feature 1..21: note = HBV-targeting guide sequence portion
  source 1..21: mol_type = other RNA
ctgcggaactcctagccgctt

SEQ ID NO: 9284 - RNA, 21 nt, synthetic construct
  misc_feature 1..21: note = HBV-targeting guide sequence portion
  source 1..21: mol_type = other RNA
ctgcggcggtatctagaagat

SEQ ID NO: 9285 - RNA, 21 nt, synthetic construct
  misc_feature 1..21: note = HBV-targeting guide sequence portion
  source 1..21: mol_type = other RNA
ctgcggcgttttatcatcttc

SEQ ID NO: 9286 - RNA, 21 nt, synthetic construct
  misc_feature 1..21: note = HBV-targeting guide sequence portion
  source 1..21: mol_type = other RNA
ctgcggtattgtgaggattct

SEQ ID NO: 9287 - RNA, 21 nt, synthetic construct
  misc_feature 1..21: note = HBV-targeting guide sequence portion
  source 1..21: mol_type = other RNA
ctgctaggctgtgctgccaac

SEQ ID NO: 9288 - RNA, 21 nt, synthetic construct
  misc_feature 1..21: note = HBV-targeting guide sequence portion
  source 1..21: mol_type = other RNA
ctgctaggttttatcctaaat

SEQ ID NO: 9289 - RNA, 21 nt, synthetic construct
  misc_feature 1..21: note = HBV-targeting guide sequence portion
  source 1..21: mol_type = other RNA
ctgctatgcctcatcttcttg

SEQ ID NO: 9290 - RNA, 21 nt, synthetic construct
  misc_feature 1..21: note = HBV-targeting guide sequence portion
  source 1..21: mol_type = other RNA
ctgctcaaggaacctctatgt

SEQ ID NO: 9291 - RNA, 21 nt, synthetic construct
  misc_feature 1..21: note = HBV-targeting guide sequence portion
  source 1..21: mol_type = other RNA
ctgctcgtgttacaggcgggg

SEQ ID NO: 9292 - RNA, 21 nt, synthetic construct
  misc_feature 1..21: note = HBV-targeting guide sequence portion
  source 1..21: mol_type = other RNA
ctgctgctatgcctcatcttc

SEQ ID NO: 9293 - RNA, 21 nt, synthetic construct
  misc_feature 1..21: note = HBV-targeting guide sequence portion
  source 1..21: mol_type = other RNA
ctgctggtggctccagttcag

SEQ ID NO: 9294 - RNA, 21 nt, synthetic construct
  misc_feature 1..21: note = HBV-targeting guide sequence portion
  source 1..21: mol_type = other RNA
ctgcttagattgaatacatgc

SEQ ID NO: 9295 - RNA, 21 nt, synthetic construct
  misc_feature 1..21: note = HBV-targeting guide sequence portion
  source 1..21: mol_type = other RNA
ctgctttaatgcccttgtatg

SEQ ID NO: 9296 - RNA, 21 nt, synthetic construct
  misc_feature 1..21: note = HBV-targeting guide sequence portion
  source 1..21: mol_type = other RNA
ctggaattagaggacagacgg

SEQ ID NO: 9297 - RNA, 21 nt, synthetic construct
  misc_feature 1..21: note = HBV-targeting guide sequence portion
  source 1..21: mol_type = other RNA
ctggactatcaaggtatgttt

SEQ ID NO: 9298 - RNA, 21 nt, synthetic construct
  misc_feature 1..21: note = HBV-targeting guide sequence portion
  source 1..21: mol_type = other RNA
ctggagcaaacattctcggga

SEQ ID NO: 9299 - RNA, 21 nt, synthetic construct
  misc_feature 1..21: note = HBV-targeting guide sequence portion
  source 1..21: mol_type = other RNA
ctggagcattcgggctagggt

SEQ ID NO: 9300 - RNA, 21 nt, synthetic construct
  misc_feature 1..21: note = HBV-targeting guide sequence portion
  source 1..21: mol_type = other RNA
ctggagccaccagcagggaga

SEQ ID NO: 9301 - RNA, 21 nt, synthetic construct
  misc_feature 1..21: note = HBV-targeting guide sequence portion
  source 1..21: mol_type = other RNA
ctggaggagtgcgaatccaca

SEQ ID NO: 9302 - RNA, 21 nt, synthetic construct
  misc_feature 1..21: note = HBV-targeting guide sequence portion
  source 1..21: mol_type = other RNA
ctggataataaggtttaatac

SEQ ID NO: 9303 - RNA, 21 nt, synthetic construct
  misc_feature 1..21: note = HBV-targeting guide sequence portion
  source 1..21: mol_type = other RNA
ctggatcctgcgcgggacgtc

SEQ ID NO: 9304 - RNA, 21 nt, synthetic construct
  misc_feature 1..21: note = HBV-targeting guide sequence portion
  source 1..21: mol_type = other RNA
ctggatgtgtctgcggcgttt

SEQ ID NO: 9305 - RNA, 21 nt, synthetic construct
  misc_feature 1..21: note = HBV-targeting guide sequence portion
  source 1..21: mol_type = other RNA
ctggattgttggagtttgctc

SEQ ID NO: 9306 - RNA, 21 nt, synthetic construct
  misc_feature 1..21: note = HBV-targeting guide sequence portion
  source 1..21: mol_type = other RNA
ctggcaacggggtaaaggttc

SEQ ID NO: 9307 - RNA, 21 nt, synthetic construct
  misc_feature 1..21: note = HBV-targeting guide sequence portion
  source 1..21: mol_type = other RNA
ctggcaaggtttgcattatgc

SEQ ID NO: 9308 - RNA, 21 nt, synthetic construct
  misc_feature 1..21: note = HBV-targeting guide sequence portion
  source 1..21: mol_type = other RNA
ctggccagacgccaacaaggt

SEQ ID NO: 9309 - RNA, 21 nt, synthetic construct
  misc_feature 1..21: note = HBV-targeting guide sequence portion
  source 1..21: mol_type = other RNA
ctggccagggatccttgttgg

SEQ ID NO: 9310 - RNA, 21 nt, synthetic construct
  misc_feature 1..21: note = HBV-targeting guide sequence portion
  source 1..21: mol_type = other RNA
ctggccgttgcctggcaacgg

SEQ ID NO: 9311 - RNA, 21 nt, synthetic construct
  misc_feature 1..21: note = HBV-targeting guide sequence portion
  source 1..21: mol_type = other RNA
ctggcgattggtagaggcagg

SEQ ID NO: 9312 - RNA, 21 nt, synthetic construct
  misc_feature 1..21: note = HBV-targeting guide sequence portion
  source 1..21: mol_type = other RNA
ctgggaggagttgggggagga

SEQ ID NO: 9313 - RNA, 21 nt, synthetic construct
  misc_feature 1..21: note = HBV-targeting guide sequence portion
  source 1..21: mol_type = other RNA
ctgggatcttgcagagtttgg

SEQ ID NO: 9314 - RNA, 21 nt, synthetic construct
  misc_feature 1..21: note = HBV-targeting guide sequence portion
  source 1..21: mol_type = other RNA
ctgggattctttcccgaccac

SEQ ID NO: 9315 - RNA, 21 nt, synthetic construct
  misc_feature 1..21: note = HBV-targeting guide sequence portion
  source 1..21: mol_type = other RNA
ctgggctttcggaaaattcct

SEQ ID NO: 9316 - RNA, 21 nt, synthetic construct
  misc_feature 1..21: note = HBV-targeting guide sequence portion
  source 1..21: mol_type = other RNA
ctggggagaactaatgactct

SEQ ID NO: 9317 - RNA, 21 nt, synthetic construct
  misc_feature 1..21: note = HBV-targeting guide sequence portion
  source 1..21: mol_type = other RNA
ctgggtccaactggtggtcgg

SEQ ID NO: 9318 - RNA, 21 nt, synthetic construct
  misc_feature 1..21: note = HBV-targeting guide sequence portion
  source 1..21: mol_type = other RNA
ctgggtgggtactaatttaga

SEQ ID NO: 9319 - RNA, 21 nt, synthetic construct
  misc_feature 1..21: note = HBV-targeting guide sequence portion
  source 1..21: mol_type = other RNA
ctgggttttgctgcccctttt

SEQ ID NO: 9320 - RNA, 21 nt, synthetic construct
  misc_feature 1..21: note = HBV-targeting guide sequence portion
  source 1..21: mol_type = other RNA
ctggtgcgcagaccaatttat

SEQ ID NO: 9321 - RNA, 21 nt, synthetic construct
  misc_feature 1..21: note = HBV-targeting guide sequence portion
  source 1..21: mol_type = other RNA
ctggtggaaagattctgcccc

SEQ ID NO: 9322 - RNA, 21 nt, synthetic construct
  misc_feature 1..21: note = HBV-targeting guide sequence portion
  source 1..21: mol_type = other RNA
ctggtggctccagttcaggaa

SEQ ID NO: 9323 - RNA, 21 nt, synthetic construct
  misc_feature 1..21: note = HBV-targeting guide sequence portion
  source 1..21: mol_type = other RNA
ctggtggtcgggaaagaatcc

SEQ ID NO: 9324 - RNA, 21 nt, synthetic construct
  misc_feature 1..21: note = HBV-targeting guide sequence portion
  source 1..21: mol_type = other RNA
ctggtggttgatgatcctgga

SEQ ID NO: 9325 - RNA, 21 nt, synthetic construct
  misc_feature 1..21: note = HBV-targeting guide sequence portion
  source 1..21: mol_type = other RNA
ctggttatcgctggatgtgtc

SEQ ID NO: 9326 - RNA, 21 nt, synthetic construct
  misc_feature 1..21: note = HBV-targeting guide sequence portion
  source 1..21: mol_type = other RNA
ctggttggggcttggtcatag

SEQ ID NO: 9327 - RNA, 21 nt, synthetic construct
  misc_feature 1..21: note = HBV-targeting guide sequence portion
  source 1..21: mol_type = other RNA
ctgtaacacgagcaggggtcc

SEQ ID NO: 9328 - RNA, 21 nt, synthetic construct
  misc_feature 1..21: note = HBV-targeting guide sequence portion
  source 1..21: mol_type = other RNA
ctgtaagcgggcctacaaact

SEQ ID NO: 9329 - RNA, 21 nt, synthetic construct
  misc_feature 1..21: note = HBV-targeting guide sequence portion
  source 1..21: mol_type = other RNA
ctgtacaaaaccttcggatgg

SEQ ID NO: 9330 - RNA, 21 nt, synthetic construct
  misc_feature 1..21: note = HBV-targeting guide sequence portion
  source 1..21: mol_type = other RNA
ctgtacagacttggcccccaa

SEQ ID NO: 9331 - RNA, 21 nt, synthetic construct
  misc_feature 1..21: note = HBV-targeting guide sequence portion
  source 1..21: mol_type = other RNA
ctgtacagcatcttgagtccc

SEQ ID NO: 9332 - RNA, 21 nt, synthetic construct
  misc_feature 1..21: note = HBV-targeting guide sequence portion
  source 1..21: mol_type = other RNA
ctgtacctgtctttaaccctc

SEQ ID NO: 9333 - RNA, 21 nt, synthetic construct
  misc_feature 1..21: note = HBV-targeting guide sequence portion
  source 1..21: mol_type = other RNA
ctgtagctcttgttcccaaga

SEQ ID NO: 9334 - RNA, 21 nt, synthetic construct
  misc_feature 1..21: note = HBV-targeting guide sequence portion
  source 1..21: mol_type = other RNA
ctgtaggcataaattggtctg

SEQ ID NO: 9335 - RNA, 21 nt, synthetic construct
  misc_feature 1..21: note = HBV-targeting guide sequence portion
  source 1..21: mol_type = other RNA
ctgtatcgggatgccttggag

SEQ ID NO: 9336 - RNA, 21 nt, synthetic construct
  misc_feature 1..21: note = HBV-targeting guide sequence portion
  source 1..21: mol_type = other RNA
ctgtatctccctgctggtggc

SEQ ID NO: 9337 - RNA, 21 nt, synthetic construct
  misc_feature 1..21: note = HBV-targeting guide sequence portion
  source 1..21: mol_type = other RNA
ctgtattcccatcccatcatc

SEQ ID NO: 9338 - RNA, 21 nt, synthetic construct
  misc_feature 1..21: note = HBV-targeting guide sequence portion
  source 1..21: mol_type = other RNA
ctgtcctccaacttgtcctgg

SEQ ID NO: 9339 - RNA, 21 nt, synthetic construct
  misc_feature 1..21: note = HBV-targeting guide sequence portion
  source 1..21: mol_type = other RNA
ctgtcctctaattccaggatc

SEQ ID NO: 9340 - RNA, 21 nt, synthetic construct
  misc_feature 1..21: note = HBV-targeting guide sequence portion
  source 1..21: mol_type = other RNA
ctgtcgtcctcttctctgcct

SEQ ID NO: 9341 - RNA, 21 nt, synthetic construct
  misc_feature 1..21: note = HBV-targeting guide sequence portion
  source 1..21: mol_type = other RNA
ctgtctccacctctgagaaac

SEQ ID NO: 9342 - RNA, 21 nt, synthetic construct
  misc_feature 1..21: note = HBV-targeting guide sequence portion
  source 1..21: mol_type = other RNA
ctgtctttaaccctcattgga

SEQ ID NO: 9343 - RNA, 21 nt, synthetic construct
  misc_feature 1..21: note = HBV-targeting guide sequence portion
  source 1..21: mol_type = other RNA
ctgtgccaagtgtttgctgat

SEQ ID NO: 9344 - RNA, 21 nt, synthetic construct
  misc_feature 1..21: note = HBV-targeting guide sequence portion
  source 1..21: mol_type = other RNA
ctgtgccttctcatctgccgg

SEQ ID NO: 9345 - RNA, 21 nt, synthetic construct
  misc_feature 1..21: note = HBV-targeting guide sequence portion
  source 1..21: mol_type = other RNA
ctgtgccttgggtggctttag

SEQ ID NO: 9346 - RNA, 21 nt, synthetic construct
  misc_feature 1..21: note = HBV-targeting guide sequence portion
  source 1..21: mol_type = other RNA
ctgtgctgccaactggatcct

SEQ ID NO: 9347 - RNA, 21 nt, synthetic construct
  misc_feature 1..21: note = HBV-targeting guide sequence portion
  source 1..21: mol_type = other RNA
ctgtggagttactctcgtttt

SEQ ID NO: 9348 - RNA, 21 nt, synthetic construct
  misc_feature 1..21: note = HBV-targeting guide sequence portion
  source 1..21: mol_type = other RNA
ctgtgggtcaccatattcttg

SEQ ID NO: 9349 - RNA, 21 nt, synthetic construct
  misc_feature 1..21: note = HBV-targeting guide sequence portion
  source 1..21: mol_type = other RNA
ctgtgtaaacaatacctgaac

SEQ ID NO: 9350 - RNA, 21 nt, synthetic construct
  misc_feature 1..21: note = HBV-targeting guide sequence portion
  source 1..21: mol_type = other RNA
ctgttaaccgggagttttctg

SEQ ID NO: 9351 - RNA, 21 nt, synthetic construct
  misc_feature 1..21: note = HBV-targeting guide sequence portion
  source 1..21: mol_type = other RNA
ctgttaccaattttcttttgt

SEQ ID NO: 9352 - RNA, 21 nt, synthetic construct
  misc_feature 1..21: note = HBV-targeting guide sequence portion
  source 1..21: mol_type = other RNA
ctgttcaagcctccaagctgt

SEQ ID NO: 9353 - RNA, 21 nt, synthetic construct
  misc_feature 1..21: note = HBV-targeting guide sequence portion
  source 1..21: mol_type = other RNA
ctgttcacattttttgataat

SEQ ID NO: 9354 - RNA, 21 nt, synthetic construct
  misc_feature 1..21: note = HBV-targeting guide sequence portion
  source 1..21: mol_type = other RNA
ctgttccgactactgcctctc

SEQ ID NO: 9355 - RNA, 21 nt, synthetic construct
  misc_feature 1..21: note = HBV-targeting guide sequence portion
  source 1..21: mol_type = other RNA
ctgttcctgaactggagccac

SEQ ID NO: 9356 - RNA, 21 nt, synthetic construct
  misc_feature 1..21: note = HBV-targeting guide sequence portion
  source 1..21: mol_type = other RNA
ctgttgctgtacaaaaccttc

SEQ ID NO: 9357 - RNA, 21 nt, synthetic construct
  misc_feature 1..21: note = HBV-targeting guide sequence portion
  source 1..21: mol_type = other RNA
ctgttgtcctctcccgcaaat

SEQ ID NO: 9358 - RNA, 21 nt, synthetic construct
  misc_feature 1..21: note = HBV-targeting guide sequence portion
  source 1..21: mol_type = other RNA
ctgtttggctttcagttatat

SEQ ID NO: 9359 - RNA, 21 nt, synthetic construct
  misc_feature 1..21: note = HBV-targeting guide sequence portion
  source 1..21: mol_type = other RNA
ctgtttgtttaaagactggga

SEQ ID NO: 9360 - RNA, 21 nt, synthetic construct
  misc_feature 1..21: note = HBV-targeting guide sequence portion
  source 1..21: mol_type = other RNA
cttaatttcatgggctatgtc

SEQ ID NO: 9361 - RNA, 21 nt, synthetic construct
  misc_feature 1..21: note = HBV-targeting guide sequence portion
  source 1..21: mol_type = other RNA
cttacaaggcctttctgtgta

SEQ ID NO: 9362 - RNA, 21 nt, synthetic construct
  misc_feature 1..21: note = HBV-targeting guide sequence portion
  source 1..21: mol_type = other RNA
cttacagttaatgagaaaaga

SEQ ID NO: 9363 - RNA, 21 nt, synthetic construct
  misc_feature 1..21: note = HBV-targeting guide sequence portion
  source 1..21: mol_type = other RNA
cttacataagaggactcttgg

SEQ ID NO: 9364 - RNA, 21 nt, synthetic construct
  misc_feature 1..21: note = HBV-targeting guide sequence portion
  source 1..21: mol_type = other RNA
cttacttttggaagagaaacg

SEQ ID NO: 9365 - RNA, 21 nt, synthetic construct
  misc_feature 1..21: note = HBV-targeting guide sequence portion
  source 1..21: mol_type = other RNA
cttagattgaatacatgcata

SEQ ID NO: 9366 - RNA, 21 nt, synthetic construct
  misc_feature 1..21: note = HBV-targeting guide sequence portion
  source 1..21: mol_type = other RNA
cttatagaccaccaaatgccc

SEQ ID NO: 9367 - RNA, 21 nt, synthetic construct
  misc_feature 1..21: note = HBV-targeting guide sequence portion
  source 1..21: mol_type = other RNA
cttatataaaacacccgcctt

SEQ ID NO: 9368 - RNA, 21 nt, synthetic construct
  misc_feature 1..21: note = HBV-targeting guide sequence portion
  source 1..21: mol_type = other RNA
cttatccaagggcaagtattt

SEQ ID NO: 9369 - RNA, 21 nt, synthetic construct
  misc_feature 1..21: note = HBV-targeting guide sequence portion
  source 1..21: mol_type = other RNA
cttatgagtccaagggatact

SEQ ID NO: 9370 - RNA, 21 nt, synthetic construct
  misc_feature 1..21: note = HBV-targeting guide sequence portion
  source 1..21: mol_type = other RNA
cttatgtaagaccttgggcaa

SEQ ID NO: 9371 - RNA, 21 nt, synthetic construct
  misc_feature 1..21: note = HBV-targeting guide sequence portion
  source 1..21: mol_type = other RNA
cttattatccagaacatctag

SEQ ID NO: 9372 - RNA, 21 nt, synthetic construct
  misc_feature 1..21: note = HBV-targeting guide sequence portion
  source 1..21: mol_type = other RNA
cttcaaagactgtttgtttaa

SEQ ID NO: 9373 - RNA, 21 nt, synthetic construct
  misc_feature 1..21: note = HBV-targeting guide sequence portion
  source 1..21: mol_type = other RNA
cttcaatcccaacaaggatcc

SEQ ID NO: 9374 - RNA, 21 nt, synthetic construct
  misc_feature 1..21: note = HBV-targeting guide sequence portion
  source 1..21: mol_type = other RNA
cttcacctctgcacgtcgcat

SEQ ID NO: 9375 - RNA, 21 nt, synthetic construct
  misc_feature 1..21: note = HBV-targeting guide sequence portion
  source 1..21: mol_type = other RNA
cttcagagcaaactccaacaa

SEQ ID NO: 9376 - RNA, 21 nt, synthetic construct
  misc_feature 1..21: note = HBV-targeting guide sequence portion
  source 1..21: mol_type = other RNA
cttcatcctgctgctatgcct

SEQ ID NO: 9377 - RNA, 21 nt, synthetic construct
  misc_feature 1..21: note = HBV-targeting guide sequence portion
  source 1..21: mol_type = other RNA
cttccaaaagtaagacaagaa

SEQ ID NO: 9378 - RNA, 21 nt, synthetic construct
  misc_feature 1..21: note = HBV-targeting guide sequence portion
  source 1..21: mol_type = other RNA
cttccaaactagacactattt

SEQ ID NO: 9379 - RNA, 21 nt, synthetic construct
  misc_feature 1..21: note = HBV-targeting guide sequence portion
  source 1..21: mol_type = other RNA
cttccaccaaactctgcaaga

SEQ ID NO: 9380 - RNA, 21 nt, synthetic construct
  misc_feature 1..21: note = HBV-targeting guide sequence portion
  source 1..21: mol_type = other RNA
cttccatagagtgtgtaaata

SEQ ID NO: 9381 - RNA, 21 nt, synthetic construct
  misc_feature 1..21: note = HBV-targeting guide sequence portion
  source 1..21: mol_type = other RNA
cttccggagacttgtgttgtt

SEQ ID NO: 9382 - RNA, 21 nt, synthetic construct
  misc_feature 1..21: note = HBV-targeting guide sequence portion
  source 1..21: mol_type = other RNA
cttccgtacgagatcttctag

SEQ ID NO: 9383 - RNA, 21 nt, synthetic construct
  misc_feature 1..21: note = HBV-targeting guide sequence portion
  source 1..21: mol_type = other RNA
cttcctcttcatcctgctgct

SEQ ID NO: 9384 - RNA, 21 nt, synthetic construct
  misc_feature 1..21: note = HBV-targeting guide sequence portion
  source 1..21: mol_type = other RNA
cttcgcttcacctctgcacgt

SEQ ID NO: 9385 - RNA, 21 nt, synthetic construct
  misc_feature 1..21: note = HBV-targeting guide sequence portion
  source 1..21: mol_type = other RNA
cttcggatggaaactgcacct

SEQ ID NO: 9386 - RNA, 21 nt, synthetic construct
  misc_feature 1..21: note = HBV-targeting guide sequence portion
  source 1..21: mol_type = other RNA
cttcgtctgcgaggcgaggga

SEQ ID NO: 9387 - RNA, 21 nt, synthetic construct
  misc_feature 1..21: note = HBV-targeting guide sequence portion
  source 1..21: mol_type = other RNA
cttctaaattagtacccaccc

SEQ ID NO: 9388 - RNA, 21 nt, synthetic construct
  misc_feature 1..21: note = HBV-targeting guide sequence portion
  source 1..21: mol_type = other RNA
cttctactgtacctgtcttta

SEQ ID NO: 9389 - RNA, 21 nt, synthetic construct
  misc_feature 1..21: note = HBV-targeting guide sequence portion
  source 1..21: mol_type = other RNA
cttctagataccgccgcagct

SEQ ID NO: 9390 - RNA, 21 nt, synthetic construct
  misc_feature 1..21: note = HBV-targeting guide sequence portion
  source 1..21: mol_type = other RNA
cttctaggggacctgcctcgt

SEQ ID NO: 9391 - RNA, 21 nt, synthetic construct
  misc_feature 1..21: note = HBV-targeting guide sequence portion
  source 1..21: mol_type = other RNA
cttctcatctgccggaccgtg

SEQ ID NO: 9392 - RNA, 21 nt, synthetic construct
  misc_feature 1..21: note = HBV-targeting guide sequence portion
  source 1..21: mol_type = other RNA
cttctcgaggattggggaccc

SEQ ID NO: 9393 - RNA, 21 nt, synthetic construct
  misc_feature 1..21: note = HBV-targeting guide sequence portion
  source 1..21: mol_type = other RNA
cttctctcaattttctagggg

SEQ ID NO: 9394 - RNA, 21 nt, synthetic construct
  misc_feature 1..21: note = HBV-targeting guide sequence portion
  source 1..21: mol_type = other RNA
cttctctgcctgccgttccga

SEQ ID NO: 9395 - RNA, 21 nt, synthetic construct
  misc_feature 1..21: note = HBV-targeting guide sequence portion
  source 1..21: mol_type = other RNA
cttctgacttctttccttccg

SEQ ID NO: 9396 - RNA, 21 nt, synthetic construct
  misc_feature 1..21: note = HBV-targeting guide sequence portion
  source 1..21: mol_type = other RNA
cttctgcgacgcggcgattga

SEQ ID NO: 9397 - RNA, 21 nt, synthetic construct
  misc_feature 1..21: note = HBV-targeting guide sequence portion
  source 1..21: mol_type = other RNA
cttctggactatcaaggtatg

SEQ ID NO: 9398 - RNA, 21 nt, synthetic construct
  misc_feature 1..21: note = HBV-targeting guide sequence portion
  source 1..21: mol_type = other RNA
cttctgggttttgctgcccct

SEQ ID NO: 9399 - RNA, 21 nt, synthetic construct
  misc_feature 1..21: note = HBV-targeting guide sequence portion
  source 1..21: mol_type = other RNA
cttcttctaggggacctgcct

SEQ ID NO: 9400 - RNA, 21 nt, synthetic construct
  misc_feature 1..21: note = HBV-targeting guide sequence portion
  source 1..21: mol_type = other RNA
cttcttgttggttcttctgga

SEQ ID NO: 9401 - RNA, 21 nt, synthetic construct
  misc_feature 1..21: note = HBV-targeting guide sequence portion
  source 1..21: mol_type = other RNA
cttctttccttccgtacgaga

SEQ ID NO: 9402 - RNA, 21 nt, synthetic construct
  misc_feature 1..21: note = HBV-targeting guide sequence portion
  source 1..21: mol_type = other RNA
cttgaacagtaggacatgaac

SEQ ID NO: 9403 - RNA, 21 nt, synthetic construct
  misc_feature 1..21: note = HBV-targeting guide sequence portion
  source 1..21: mol_type = other RNA
cttgagcaggagtcgtgcagg

SEQ ID NO: 9404 - RNA, 21 nt, synthetic construct
  misc_feature 1..21: note = HBV-targeting guide sequence portion
  source 1..21: mol_type = other RNA
cttgaggcatacttcaaagac

SEQ ID NO: 9405 - RNA, 21 nt, synthetic construct
  misc_feature 1..21: note = HBV-targeting guide sequence portion
  source 1..21: mol_type = other RNA
cttgagtccctttataccgct

SEQ ID NO: 9406 - RNA, 21 nt, synthetic construct
  misc_feature 1..21: note = HBV-targeting guide sequence portion
  source 1..21: mol_type = other RNA
cttgatagtccagaagaacca

SEQ ID NO: 9407 - RNA, 21 nt, synthetic construct
  misc_feature 1..21: note = HBV-targeting guide sequence portion
  source 1..21: mol_type = other RNA
cttgatcttctaaattagtac

SEQ ID NO: 9408 - RNA, 21 nt, synthetic construct
  misc_feature 1..21: note = HBV-targeting guide sequence portion
  source 1..21: mol_type = other RNA
cttgcagagtttggtggaagg

SEQ ID NO: 9409 - RNA, 21 nt, synthetic construct
  misc_feature 1..21: note = HBV-targeting guide sequence portion
  source 1..21: mol_type = other RNA
cttgccagcaaatccgcctcc

SEQ ID NO: 9410 - RNA, 21 nt, synthetic construct
  misc_feature 1..21: note = HBV-targeting guide sequence portion
  source 1..21: mol_type = other RNA
cttgcccaaggtcttacataa

SEQ ID NO: 9411 - RNA, 21 nt, synthetic construct
  misc_feature 1..21: note = HBV-targeting guide sequence portion
  source 1..21: mol_type = other RNA
cttgcccttggataagggtat

SEQ ID NO: 9412 - RNA, 21 nt, synthetic construct
  misc_feature 1..21: note = HBV-targeting guide sequence portion
  source 1..21: mol_type = other RNA
cttgcctgagtgcagtatggt

SEQ ID NO: 9413 - RNA, 21 nt, synthetic construct
  misc_feature 1..21: note = HBV-targeting guide sequence portion
  source 1..21: mol_type = other RNA
cttggactcataaggtgggaa

SEQ ID NO: 9414 - RNA, 21 nt, synthetic construct
  misc_feature 1..21: note = HBV-targeting guide sequence portion
  source 1..21: mol_type = other RNA
cttggactctctgcaatgtca

SEQ ID NO: 9415 - RNA, 21 nt, synthetic construct
  misc_feature 1..21: note = HBV-targeting guide sequence portion
  source 1..21: mol_type = other RNA
cttggaggcttgaacagtagg

SEQ ID NO: 9416 - RNA, 21 nt, synthetic construct
  misc_feature 1..21: note = HBV-targeting guide sequence portion
  source 1..21: mol_type = other RNA
cttggagtctcctgagcattg

SEQ ID NO: 9417 - RNA, 21 nt, synthetic construct
  misc_feature 1..21: note = HBV-targeting guide sequence portion
  source 1..21: mol_type = other RNA
cttggataagggtattaaacc

SEQ ID NO: 9418 - RNA, 21 nt, synthetic construct
  misc_feature 1..21: note = HBV-targeting guide sequence portion
  source 1..21: mol_type = other RNA
cttggcacagacctggccgtt

SEQ ID NO: 9419 - RNA, 21 nt, synthetic construct
  misc_feature 1..21: note = HBV-targeting guide sequence portion
  source 1..21: mol_type = other RNA
cttggccaaaattcgcagtcc

SEQ ID NO: 9420 - RNA, 21 nt, synthetic construct
  misc_feature 1..21: note = HBV-targeting guide sequence portion
  source 1..21: mol_type = other RNA
cttggcccccaataccacatc

SEQ ID NO: 9421 - RNA, 21 nt, synthetic construct
  misc_feature 1..21: note = HBV-targeting guide sequence portion
  source 1..21: mol_type = other RNA
cttggctcagtttactagtgc

SEQ ID NO: 9422 - RNA, 21 nt, synthetic construct
  misc_feature 1..21: note = HBV-targeting guide sequence portion
  source 1..21: mol_type = other RNA
cttgggaacaagagctacagc

SEQ ID NO: 9423 - RNA, 21 nt, synthetic construct
  misc_feature 1..21: note = HBV-targeting guide sequence portion
  source 1..21: mol_type = other RNA
cttgggcaagaattggtgggc

SEQ ID NO: 9424 - RNA, 21 nt, synthetic construct
  misc_feature 1..21: note = HBV-targeting guide sequence portion
  source 1..21: mol_type = other RNA
cttggggccctgtcgtcctct

SEQ ID NO: 9425 - RNA, 21 nt, synthetic construct
  misc_feature 1..21: note = HBV-targeting guide sequence portion
  source 1..21: mol_type = other RNA
cttgggtggctttagggcatg

SEQ ID NO: 9426 - RNA, 21 nt, synthetic construct
  misc_feature 1..21: note = HBV-targeting guide sequence portion
  source 1..21: mol_type = other RNA
cttggtcataggccatcagcg

SEQ ID NO: 9427 - RNA, 21 nt, synthetic construct
  misc_feature 1..21: note = HBV-targeting guide sequence portion
  source 1..21: mol_type = other RNA
cttggtgtagatgtatattag

SEQ ID NO: 9428 - RNA, 21 nt, synthetic construct
  misc_feature 1..21: note = HBV-targeting guide sequence portion
  source 1..21: mol_type = other RNA
cttgtaagttggcgaaaaagt

SEQ ID NO: 9429 - RNA, 21 nt, synthetic construct
  misc_feature 1..21: note = HBV-targeting guide sequence portion
  source 1..21: mol_type = other RNA
cttgtatgcatgtattcaatc

SEQ ID NO: 9430 - RNA, 21 nt, synthetic construct
  misc_feature 1..21: note = HBV-targeting guide sequence portion
  source 1..21: mol_type = other RNA
cttgtcaacaaggaaaacccc

SEQ ID NO: 9431 - RNA, 21 nt, synthetic construct
  misc_feature 1..21: note = HBV-targeting guide sequence portion
  source 1..21: mol_type = other RNA
cttgtcctggttatcgctgga

SEQ ID NO: 9432 - RNA, 21 nt, synthetic construct
  misc_feature 1..21: note = HBV-targeting guide sequence portion
  source 1..21: mol_type = other RNA
cttgtcttacttttggaagag

SEQ ID NO: 9433 - RNA, 21 nt, synthetic construct
  misc_feature 1..21: note = HBV-targeting guide sequence portion
  source 1..21: mol_type = other RNA
cttgtgttgttagacgacgag

SEQ ID NO: 9434 - RNA, 21 nt, synthetic construct
  misc_feature 1..21: note = HBV-targeting guide sequence portion
  source 1..21: mol_type = other RNA
cttgttcatgtcctactgttc

SEQ ID NO: 9435 - RNA, 21 nt, synthetic construct
  misc_feature 1..21: note = HBV-targeting guide sequence portion
  source 1..21: mol_type = other RNA
cttgttcccaagaatatggtg

SEQ ID NO: 9436 - RNA, 21 nt, synthetic construct
  misc_feature 1..21: note = HBV-targeting guide sequence portion
  source 1..21: mol_type = other RNA
cttgttgacaagaatcctcac

SEQ ID NO: 9437 - RNA, 21 nt, synthetic construct
  misc_feature 1..21: note = HBV-targeting guide sequence portion
  source 1..21: mol_type = other RNA
cttgttggcgtctggccaggg

SEQ ID NO: 9438 - RNA, 21 nt, synthetic construct
  misc_feature 1..21: note = HBV-targeting guide sequence portion
  source 1..21: mol_type = other RNA
cttgttgggattgaagtccca

SEQ ID NO: 9439 - RNA, 21 nt, synthetic construct
  misc_feature 1..21: note = HBV-targeting guide sequence portion
  source 1..21: mol_type = other RNA
cttgttggttcttctggacta

SEQ ID NO: 9440 - RNA, 21 nt, synthetic construct
  misc_feature 1..21: note = HBV-targeting guide sequence portion
  source 1..21: mol_type = other RNA
cttgttttgctcgcagccggt

SEQ ID NO: 9441 - RNA, 21 nt, synthetic construct
  misc_feature 1..21: note = HBV-targeting guide sequence portion
  source 1..21: mol_type = other RNA
ctttaaacaaacagtctttga

SEQ ID NO: 9442 - RNA, 21 nt, synthetic construct
  misc_feature 1..21: note = HBV-targeting guide sequence portion
  source 1..21: mol_type = other RNA
ctttaaccctcattggaaaac

SEQ ID NO: 9443 - RNA, 21 nt, synthetic construct
  misc_feature 1..21: note = HBV-targeting guide sequence portion
  source 1..21: mol_type = other RNA
ctttaatgcccttgtatgcat

SEQ ID NO: 9444 - RNA, 21 nt, synthetic construct
  misc_feature 1..21: note = HBV-targeting guide sequence portion
  source 1..21: mol_type = other RNA
ctttaccccgttgccaggcaa

SEQ ID NO: 9445 - RNA, 21 nt, synthetic construct
  misc_feature 1..21: note = HBV-targeting guide sequence portion
  source 1..21: mol_type = other RNA
ctttacgcggactccccgtct

SEQ ID NO: 9446 - RNA, 21 nt, synthetic construct
  misc_feature 1..21: note = HBV-targeting guide sequence portion
  source 1..21: mol_type = other RNA
ctttaggcccatatgagtgtt

SEQ ID NO: 9447 - RNA, 21 nt, synthetic construct
  misc_feature 1..21: note = HBV-targeting guide sequence portion
  source 1..21: mol_type = other RNA
ctttagggcatggacattgac

SEQ ID NO: 9448 - RNA, 21 nt, synthetic construct
  misc_feature 1..21: note = HBV-targeting guide sequence portion
  source 1..21: mol_type = other RNA
ctttataccgctgttaccaat

SEQ ID NO: 9449 - RNA, 21 nt, synthetic construct
  misc_feature 1..21: note = HBV-targeting guide sequence portion
  source 1..21: mol_type = other RNA
ctttatatgggtcaatgtcca

SEQ ID NO: 9450 - RNA, 21 nt, synthetic construct
  misc_feature 1..21: note = HBV-targeting guide sequence portion
  source 1..21: mol_type = other RNA
ctttattcttctactgtacct

SEQ ID NO: 9451 - RNA, 21 nt, synthetic construct
  misc_feature 1..21: note = HBV-targeting guide sequence portion
  source 1..21: mol_type = other RNA
ctttcactttttcgccaactt

SEQ ID NO: 9452 - RNA, 21 nt, synthetic construct
  misc_feature 1..21: note = HBV-targeting guide sequence portion
  source 1..21: mol_type = other RNA
ctttcagttatatggatgatg

SEQ ID NO: 9453 - RNA, 21 nt, synthetic construct
  misc_feature 1..21: note = HBV-targeting guide sequence portion
  source 1..21: mol_type = other RNA
ctttccaatcaataggcctgt

SEQ ID NO: 9454 - RNA, 21 nt, synthetic construct
  misc_feature 1..21: note = HBV-targeting guide sequence portion
  source 1..21: mol_type = other RNA
ctttccaccagcaatcctctg

SEQ ID NO: 9455 - RNA, 21 nt, synthetic construct
  misc_feature 1..21: note = HBV-targeting guide sequence portion
  source 1..21: mol_type = other RNA
ctttcccccactgtttggctt

SEQ ID NO: 9456 - RNA, 21 nt, synthetic construct
  misc_feature 1..21: note = HBV-targeting guide sequence portion
  source 1..21: mol_type = other RNA
ctttcccgaccaccagttgga

SEQ ID NO: 9457 - RNA, 21 nt, synthetic construct
  misc_feature 1..21: note = HBV-targeting guide sequence portion
  source 1..21: mol_type = other RNA
ctttccggctcctctgccgat

SEQ ID NO: 9458 - RNA, 21 nt, synthetic construct
  misc_feature 1..21: note = HBV-targeting guide sequence portion
  source 1..21: mol_type = other RNA
ctttccttccgtacgagatct

SEQ ID NO: 9459 - RNA, 21 nt, synthetic construct
  misc_feature 1..21: note = HBV-targeting guide sequence portion
  source 1..21: mol_type = other RNA
ctttcggaaaattcctatggg

SEQ ID NO: 9460 - RNA, 21 nt, synthetic construct
  misc_feature 1..21: note = HBV-targeting guide sequence portion
  source 1..21: mol_type = other RNA
ctttctgtgtaaacaatacct

SEQ ID NO: 9461 - RNA, 21 nt, synthetic construct
  misc_feature 1..21: note = HBV-targeting guide sequence portion
  source 1..21: mol_type = other RNA
ctttgaagtatgcctcaaggt

SEQ ID NO: 9462 - RNA, 21 nt, synthetic construct
  misc_feature 1..21: note = HBV-targeting guide sequence portion
  source 1..21: mol_type = other RNA
ctttgattttgtgtatgatgt

SEQ ID NO: 9463 - RNA, 21 nt, synthetic construct
  misc_feature 1..21: note = HBV-targeting guide sequence portion
  source 1..21: mol_type = other RNA
ctttgctggggagaactaatg

SEQ ID NO: 9464 - RNA, 21 nt, synthetic construct
  misc_feature 1..21: note = HBV-targeting guide sequence portion
  source 1..21: mol_type = other RNA
ctttgggtgtacatttaaacc

SEQ ID NO: 9465 - RNA, 21 nt, synthetic construct
  misc_feature 1..21: note = HBV-targeting guide sequence portion
  source 1..21: mol_type = other RNA
ctttgtactaggaggctgtag

SEQ ID NO: 9466 - RNA, 21 nt, synthetic construct
  misc_feature 1..21: note = HBV-targeting guide sequence portion
  source 1..21: mol_type = other RNA
ctttgtttacgtcccgtcggc

SEQ ID NO: 9467 - RNA, 21 nt, synthetic construct
  misc_feature 1..21: note = HBV-targeting guide sequence portion
  source 1..21: mol_type = other RNA
ctttgttttgttagggtttaa

SEQ ID NO: 9468 - RNA, 21 nt, synthetic construct
  misc_feature 1..21: note = HBV-targeting guide sequence portion
  source 1..21: mol_type = other RNA
cttttacacaatgtggttatc

SEQ ID NO: 9469 - RNA, 21 nt, synthetic construct
  misc_feature 1..21: note = HBV-targeting guide sequence portion
  source 1..21: mol_type = other RNA
cttttcctaatatacatctac

SEQ ID NO: 9470 - RNA, 21 nt, synthetic construct
  misc_feature 1..21: note = HBV-targeting guide sequence portion
  source 1..21: mol_type = other RNA
cttttctcattaactgtaagc

SEQ ID NO: 9471 - RNA, 21 nt, synthetic construct
  misc_feature 1..21: note = HBV-targeting guide sequence portion
  source 1..21: mol_type = other RNA
cttttggaagagaaacggtcc

SEQ ID NO: 9472 - RNA, 21 nt, synthetic construct
  misc_feature 1..21: note = HBV-targeting guide sequence portion
  source 1..21: mol_type = other RNA
cttttggagtgtggattcgca

SEQ ID NO: 9473 - RNA, 21 nt, synthetic construct
  misc_feature 1..21: note = HBV-targeting guide sequence portion
  source 1..21: mol_type = other RNA
cttttggggtggagccctcag

SEQ ID NO: 9474 - RNA, 21 nt, synthetic construct
  misc_feature 1..21: note = HBV-targeting guide sequence portion
  source 1..21: mol_type = other RNA
cttttgtctttgggtgtacat

SEQ ID NO: 9475 - RNA, 21 nt, synthetic construct
  misc_feature 1..21: note = HBV-targeting guide sequence portion
  source 1..21: mol_type = other RNA
ctttttcacctctgcctaatc

SEQ ID NO: 9476 - RNA, 21 nt, synthetic construct
  misc_feature 1..21: note = HBV-targeting guide sequence portion
  source 1..21: mol_type = other RNA
ctttttcgccaacttacaagg

SEQ ID NO: 9477 - RNA, 21 nt, synthetic construct
  misc_feature 1..21: note = HBV-targeting guide sequence portion
  source 1..21: mol_type = other RNA
gaaaaagtgaaagcctgctta

SEQ ID NO: 9478 - RNA, 21 nt, synthetic construct
  misc_feature 1..21: note = HBV-targeting guide sequence portion
  source 1..21: mol_type = other RNA
gaaaaagttgcatggtgctgg

SEQ ID NO: 9479 - RNA, 21 nt, synthetic construct
  misc_feature 1..21: note = HBV-targeting guide sequence portion
  source 1..21: mol_type = other RNA
gaaaacaccctcttttcctaa

SEQ ID NO: 9480 - RNA, 21 nt, synthetic construct
  misc_feature 1..21: note = HBV-targeting guide sequence portion
  source 1..21: mol_type = other RNA
gaaaaccccgcctgtaacacg

SEQ ID NO: 9481 - RNA, 21 nt, synthetic construct
  misc_feature 1..21: note = HBV-targeting guide sequence portion
  source 1..21: mol_type = other RNA
gaaaactcccggttaacaggc

SEQ ID NO: 9482 - RNA, 21 nt, synthetic construct
  misc_feature 1..21: note = HBV-targeting guide sequence portion
  source 1..21: mol_type = other RNA
gaaaagacggttgaaattgat

SEQ ID NO: 9483 - RNA, 21 nt, synthetic construct
  misc_feature 1..21: note = HBV-targeting guide sequence portion
  source 1..21: mol_type = other RNA
gaaaagagggtgttttccaat

SEQ ID NO: 9484 - RNA, 21 nt, synthetic construct
  misc_feature 1..21: note = HBV-targeting guide sequence portion
  source 1..21: mol_type = other RNA
gaaaattcctatgggagtggg

SEQ ID NO: 9485 - RNA, 21 nt, synthetic construct
  misc_feature 1..21: note = HBV-targeting guide sequence portion
  source 1..21: mol_type = other RNA
gaaaattgagagaagtccacc

SEQ ID NO: 9486 - RNA, 21 nt, synthetic construct
  misc_feature 1..21: note = HBV-targeting guide sequence portion
  source 1..21: mol_type = other RNA
gaaaattggtaacagcggtat

SEQ ID NO: 9487 - RNA, 21 nt, synthetic construct
  misc_feature 1..21: note = HBV-targeting guide sequence portion
  source 1..21: mol_type = other RNA
gaaacactcatcctcaggcca

SEQ ID NO: 9488 - RNA, 21 nt, synthetic construct
  misc_feature 1..21: note = HBV-targeting guide sequence portion
  source 1..21: mol_type = other RNA
gaaacataccttgatagtcca

SEQ ID NO: 9489 - RNA, 21 nt, synthetic construct
  misc_feature 1..21: note = HBV-targeting guide sequence portion
  source 1..21: mol_type = other RNA
gaaacattctttgattttgtg

SEQ ID NO: 9490 - RNA, 21 nt, synthetic construct
  misc_feature 1..21: note = HBV-targeting guide sequence portion
  source 1..21: mol_type = other RNA
gaaaccacaatagttgtctga

SEQ ID NO: 9491 - RNA, 21 nt, synthetic construct
  misc_feature 1..21: note = HBV-targeting guide sequence portion
  source 1..21: mol_type = other RNA
gaaacgggctgaggcccactc

SEQ ID NO: 9492 - RNA, 21 nt, synthetic construct
  misc_feature 1..21: note = HBV-targeting guide sequence portion
  source 1..21: mol_type = other RNA
gaaacggtcctagagtatttg

SEQ ID NO: 9493 - RNA, 21 nt, synthetic construct
  misc_feature 1..21: note = HBV-targeting guide sequence portion
  source 1..21: mol_type = other RNA
gaaactgcacctgtattccca

SEQ ID NO: 9494 - RNA, 21 nt, synthetic construct
  misc_feature 1..21: note = HBV-targeting guide sequence portion
  source 1..21: mol_type = other RNA
gaaagaagtcagaaggcaaaa

SEQ ID NO: 9495 - RNA, 21 nt, synthetic construct
  misc_feature 1..21: note = HBV-targeting guide sequence portion
  source 1..21: mol_type = other RNA
gaaagaatcccagaggattgc

SEQ ID NO: 9496 - RNA, 21 nt, synthetic construct
  misc_feature 1..21: note = HBV-targeting guide sequence portion
  source 1..21: mol_type = other RNA
gaaagattctgccccatgctg

SEQ ID NO: 9497 - RNA, 21 nt, synthetic construct
  misc_feature 1..21: note = HBV-targeting guide sequence portion
  source 1..21: mol_type = other RNA
gaaagccaaacagtgggggaa

SEQ ID NO: 9498 - RNA, 21 nt, synthetic construct
  misc_feature 1..21: note = HBV-targeting guide sequence portion
  source 1..21: mol_type = other RNA
gaaagcccaggatgatgggat

SEQ ID NO: 9499 - RNA, 21 nt, synthetic construct
  misc_feature 1..21: note = HBV-targeting guide sequence portion
  source 1..21: mol_type = other RNA
gaaagccctacgaaccactga

SEQ ID NO: 9500 - RNA, 21 nt, synthetic construct
  misc_feature 1..21: note = HBV-targeting guide sequence portion
  source 1..21: mol_type = other RNA
gaaagcctgcttagattgaat

SEQ ID NO: 9501 - RNA, 21 nt, synthetic construct
  misc_feature 1..21: note = HBV-targeting guide sequence portion
  source 1..21: mol_type = other RNA
gaaaggccttgtaagttggcg

SEQ ID NO: 9502 - RNA, 21 nt, synthetic construct
  misc_feature 1..21: note = HBV-targeting guide sequence portion
  source 1..21: mol_type = other RNA
gaaaggttccacgcatgcgct

SEQ ID NO: 9503 - RNA, 21 nt, synthetic construct
  misc_feature 1..21: note = HBV-targeting guide sequence portion
  source 1..21: mol_type = other RNA
gaaagtgtgtcaacgaattgt

SEQ ID NO: 9504 - RNA, 21 nt, synthetic construct
  misc_feature 1..21: note = HBV-targeting guide sequence portion
  source 1..21: mol_type = other RNA
gaaatgtgaaaccacaatagt

SEQ ID NO: 9505 - RNA, 21 nt, synthetic construct
  misc_feature 1..21: note = HBV-targeting guide sequence portion
  source 1..21: mol_type = other RNA
gaaattaagagaataacccca

SEQ ID NO: 9506 - RNA, 21 nt, synthetic construct
  misc_feature 1..21: note = HBV-targeting guide sequence portion
  source 1..21: mol_type = other RNA
gaaattgattatgcctgctag

SEQ ID NO: 9507 - RNA, 21 nt, synthetic construct
  misc_feature 1..21: note = HBV-targeting guide sequence portion
  source 1..21: mol_type = other RNA
gaaattttacggggctttatt

SEQ ID NO: 9508 - RNA, 21 nt, synthetic construct
  misc_feature 1..21: note = HBV-targeting guide sequence portion
  source 1..21: mol_type = other RNA
gaacaaatggcactagtaaac

SEQ ID NO: 9509 - RNA, 21 nt, synthetic construct
  misc_feature 1..21: note = HBV-targeting guide sequence portion
  source 1..21: mol_type = other RNA
gaacaagagatgattaggcag

SEQ ID NO: 9510 - RNA, 21 nt, synthetic construct
  misc_feature 1..21: note = HBV-targeting guide sequence portion
  source 1..21: mol_type = other RNA
gaacaagagctacagcatggg

SEQ ID NO: 9511 - RNA, 21 nt, synthetic construct
  misc_feature 1..21: note = HBV-targeting guide sequence portion
  source 1..21: mol_type = other RNA
gaacaatgctcaggagactcc

SEQ ID NO: 9512 - RNA, 21 nt, synthetic construct
  misc_feature 1..21: note = HBV-targeting guide sequence portion
  source 1..21: mol_type = other RNA
gaacagggtttactgttcctg

SEQ ID NO: 9513 - RNA, 21 nt, synthetic construct
  misc_feature 1..21: note = HBV-targeting guide sequence portion
  source 1..21: mol_type = other RNA
gaacagtaaaccctgttccga

SEQ ID NO: 9514 - RNA, 21 nt, synthetic construct
  misc_feature 1..21: note = HBV-targeting guide sequence portion
  source 1..21: mol_type = other RNA
gaacagtaggacatgaacaag

SEQ ID NO: 9515 - RNA, 21 nt, synthetic construct
  misc_feature 1..21: note = HBV-targeting guide sequence portion
  source 1..21: mol_type = other RNA
gaacagtttgtaggcccgctt

SEQ ID NO: 9516 - RNA, 21 nt, synthetic construct
  misc_feature 1..21: note = HBV-targeting guide sequence portion
  source 1..21: mol_type = other RNA
gaacatcacatcaggattcct

SEQ ID NO: 9517 - RNA, 21 nt, synthetic construct
  misc_feature 1..21: note = HBV-targeting guide sequence portion
  source 1..21: mol_type = other RNA
gaacatctagttaatcattac

SEQ ID NO: 9518 - RNA, 21 nt, synthetic construct
  misc_feature 1..21: note = HBV-targeting guide sequence portion
  source 1..21: mol_type = other RNA
gaacatggagaacatcacatc

SEQ ID NO: 9519 - RNA, 21 nt, synthetic construct
  misc_feature 1..21: note = HBV-targeting guide sequence portion
  source 1..21: mol_type = other RNA
gaaccaacaagaagatgaggc

SEQ ID NO: 9520 - RNA, 21 nt, synthetic construct
  misc_feature 1..21: note = HBV-targeting guide sequence portion
  source 1..21: mol_type = other RNA
gaaccactgaacaaatggcac

SEQ ID NO: 9521 - RNA, 21 nt, synthetic construct
  misc_feature 1..21: note = HBV-targeting guide sequence portion
  source 1..21: mol_type = other RNA
gaaccctagcccgaatgctcc

SEQ ID NO: 9522 - RNA, 21 nt, synthetic construct
  misc_feature 1..21: note = HBV-targeting guide sequence portion
  source 1..21: mol_type = other RNA
gaacctctatgtatccctcct

SEQ ID NO: 9523 - RNA, 21 nt, synthetic construct
  misc_feature 1..21: note = HBV-targeting guide sequence portion
  source 1..21: mol_type = other RNA
gaacctgcacgactcctgctc

SEQ ID NO: 9524 - RNA, 21 nt, synthetic construct
  misc_feature 1..21: note = HBV-targeting guide sequence portion
  source 1..21: mol_type = other RNA
gaacctttaccccgttgccag

SEQ ID NO: 9525 - RNA, 21 nt, synthetic construct
  misc_feature 1..21: note = HBV-targeting guide sequence portion
  source 1..21: mol_type = other RNA
gaacctttccggctcctctgc

SEQ ID NO: 9526 - RNA, 21 nt, synthetic construct
  misc_feature 1..21: note = HBV-targeting guide sequence portion
  source 1..21: mol_type = other RNA
gaacgatgtatatttgcggga

SEQ ID NO: 9527 - RNA, 21 nt, synthetic construct
  misc_feature 1..21: note = HBV-targeting guide sequence portion
  source 1..21: mol_type = other RNA
gaacgcccaccaattcttgcc

SEQ ID NO: 9528 - RNA, 21 nt, synthetic construct
  misc_feature 1..21: note = HBV-targeting guide sequence portion
  source 1..21: mol_type = other RNA
gaacggcaggcagagaagagg

SEQ ID NO: 9529 - RNA, 21 nt, synthetic construct
  misc_feature 1..21: note = HBV-targeting guide sequence portion
  source 1..21: mol_type = other RNA
gaactaatgactctagctacc

SEQ ID NO: 9530 - RNA, 21 nt, synthetic construct
  misc_feature 1..21: note = HBV-targeting guide sequence portion
  source 1..21: mol_type = other RNA
gaactaccgtgtgtcttggcc

SEQ ID NO: 9531 - RNA, 21 nt, synthetic construct
  misc_feature 1..21: note = HBV-targeting guide sequence portion
  source 1..21: mol_type = other RNA
gaactccctcgcctcgcagac

SEQ ID NO: 9532 - RNA, 21 nt, synthetic construct
  misc_feature 1..21: note = HBV-targeting guide sequence portion
  source 1..21: mol_type = other RNA
gaactcctagccgcttgtttt

SEQ ID NO: 9533 - RNA, 21 nt, synthetic construct
  misc_feature 1..21: note = HBV-targeting guide sequence portion
  source 1..21: mol_type = other RNA
gaactggagccaccagcaggg

SEQ ID NO: 9534 - RNA, 21 nt, synthetic construct
  misc_feature 1..21: note = HBV-targeting guide sequence portion
  source 1..21: mol_type = other RNA
gaactttaggcccatatgagt

SEQ ID NO: 9535 - RNA, 21 nt, synthetic construct
  misc_feature 1..21: note = HBV-targeting guide sequence portion
  source 1..21: mol_type = other RNA
gaagaaccaacaagaagatga

SEQ ID NO: 9536 - RNA, 21 nt, synthetic construct
  misc_feature 1..21: note = HBV-targeting guide sequence portion
  source 1..21: mol_type = other RNA
gaagaactccctcgcctcgca

SEQ ID NO: 9537 - RNA, 21 nt, synthetic construct
  misc_feature 1..21: note = HBV-targeting guide sequence portion
  source 1..21: mol_type = other RNA
gaagaagaactccctcgcctc

SEQ ID NO: 9538 - RNA, 21 nt, synthetic construct
  misc_feature 1..21: note = HBV-targeting guide sequence portion
  source 1..21: mol_type = other RNA
gaagaataaagccccgtaaaa

SEQ ID NO: 9539 - RNA, 21 nt, synthetic construct
  misc_feature 1..21: note = HBV-targeting guide sequence portion
  source 1..21: mol_type = other RNA
gaagacccacaattcgttgac

SEQ ID NO: 9540 - RNA, 21 nt, synthetic construct
  misc_feature 1..21: note = HBV-targeting guide sequence portion
  source 1..21: mol_type = other RNA
gaagagaaacggtcctagagt

SEQ ID NO: 9541 - RNA, 21 nt, synthetic construct
  misc_feature 1..21: note = HBV-targeting guide sequence portion
  source 1..21: mol_type = other RNA
gaagaggaagatgataaaacg

SEQ ID NO: 9542 - RNA, 21 nt, synthetic construct
  misc_feature 1..21: note = HBV-targeting guide sequence portion
  source 1..21: mol_type = other RNA
gaagaggacgacagggcccca

SEQ ID NO: 9543 - RNA, 21 nt, synthetic construct
  misc_feature 1..21: note = HBV-targeting guide sequence portion
  source 1..21: mol_type = other RNA
gaagatcaagcatctagggac

SEQ ID NO: 9544 - RNA, 21 nt, synthetic construct
  misc_feature 1..21: note = HBV-targeting guide sequence portion
  source 1..21: mol_type = other RNA
gaagatctcaatcgccgcgtc

SEQ ID NO: 9545 - RNA, 21 nt, synthetic construct
  misc_feature 1..21: note = HBV-targeting guide sequence portion
  source 1..21: mol_type = other RNA
gaagatctcaatctcggggat

SEQ ID NO: 9546 - RNA, 21 nt, synthetic construct
  misc_feature 1..21: note = HBV-targeting guide sequence portion
  source 1..21: mol_type = other RNA
gaagatctcgtacggaaggaa

SEQ ID NO: 9547 - RNA, 21 nt, synthetic construct
  misc_feature 1..21: note = HBV-targeting guide sequence portion
  source 1..21: mol_type = other RNA
gaagatgaggcatagcagcag

SEQ ID NO: 9548 - RNA, 21 nt, synthetic construct
  misc_feature 1..21: note = HBV-targeting guide sequence portion
  source 1..21: mol_type = other RNA
gaagatgataaaacgccgcag

SEQ ID NO: 9549 - RNA, 21 nt, synthetic construct
  misc_feature 1..21: note = HBV-targeting guide sequence portion
  source 1..21: mol_type = other RNA
gaagattgacgatatgtgaga

SEQ ID NO: 9550 - RNA, 21 nt, synthetic construct
  misc_feature 1..21: note = HBV-targeting guide sequence portion
  source 1..21: mol_type = other RNA
gaagcgaagtgcacacggtcc

SEQ ID NO: 9551 - RNA, 21 nt, synthetic construct
  misc_feature 1..21: note = HBV-targeting guide sequence portion
  source 1..21: mol_type = other RNA
gaaggaaagaagtcagaaggc

SEQ ID NO: 9552 - RNA, 21 nt, synthetic construct
  misc_feature 1..21: note = HBV-targeting guide sequence portion
  source 1..21: mol_type = other RNA
gaaggcaaaaacgagagtaac

SEQ ID NO: 9553 - RNA, 21 nt, synthetic construct
  misc_feature 1..21: note = HBV-targeting guide sequence portion
  source 1..21: mol_type = other RNA
gaaggcacagacggggagtcc

SEQ ID NO: 9554 - RNA, 21 nt, synthetic construct
  misc_feature 1..21: note = HBV-targeting guide sequence portion
  source 1..21: mol_type = other RNA
gaaggcgggtgttttatataa

SEQ ID NO: 9555 - RNA, 21 nt, synthetic construct
  misc_feature 1..21: note = HBV-targeting guide sequence portion
  source 1..21: mol_type = other RNA
gaaggctgggtccaactggtg

SEQ ID NO: 9556 - RNA, 21 nt, synthetic construct
  misc_feature 1..21: note = HBV-targeting guide sequence portion
  source 1..21: mol_type = other RNA
gaaggttttgtacagcaacag

SEQ ID NO: 9557 - RNA, 21 nt, synthetic construct
  misc_feature 1..21: note = HBV-targeting guide sequence portion
  source 1..21: mol_type = other RNA
gaagtaatgattaactagatg

SEQ ID NO: 9558 - RNA, 21 nt, synthetic construct
  misc_feature 1..21: note = HBV-targeting guide sequence portion
  source 1..21: mol_type = other RNA
gaagtatgcctcaaggtcggt

SEQ ID NO: 9559 - RNA, 21 nt, synthetic construct
  misc_feature 1..21: note = HBV-targeting guide sequence portion
  source 1..21: mol_type = other RNA
gaagtcagaaggcaaaaacga

SEQ ID NO: 9560 - RNA, 21 nt, synthetic construct
  misc_feature 1..21: note = HBV-targeting guide sequence portion
  source 1..21: mol_type = other RNA
gaagtccaccacgagtctaga

SEQ ID NO: 9561 - RNA, 21 nt, synthetic construct
  misc_feature 1..21: note = HBV-targeting guide sequence portion
  source 1..21: mol_type = other RNA
gaagtcccaatctggattgtt

SEQ ID NO: 9562 - RNA, 21 nt, synthetic construct
  misc_feature 1..21: note = HBV-targeting guide sequence portion
  source 1..21: mol_type = other RNA
gaagtgcacacggtccggcag

SEQ ID NO: 9563 - RNA, 21 nt, synthetic construct
  misc_feature 1..21: note = HBV-targeting guide sequence portion
  source 1..21: mol_type = other RNA
gaagtgttgataggatagggg

SEQ ID NO: 9564 - RNA, 21 nt, synthetic construct
  misc_feature 1..21: note = HBV-targeting guide sequence portion
  source 1..21: mol_type = other RNA
gaataaagccccgtaaaattt

SEQ ID NO: 9565 - RNA, 21 nt, synthetic construct
  misc_feature 1..21: note = HBV-targeting guide sequence portion
  source 1..21: mol_type = other RNA
gaataaccccatctctttgtt

SEQ ID NO: 9566 - RNA, 21 nt, synthetic construct
  misc_feature 1..21: note = HBV-targeting guide sequence portion
  source 1..21: mol_type = other RNA
gaatacaggtgcagtttccat

SEQ ID NO: 9567 - RNA, 21 nt, synthetic construct
  misc_feature 1..21: note = HBV-targeting guide sequence portion
  source 1..21: mol_type = other RNA
gaatacatgcatacaagggca

SEQ ID NO: 9568 - RNA, 21 nt, synthetic construct
  misc_feature 1..21: note = HBV-targeting guide sequence portion
  source 1..21: mol_type = other RNA
gaatatggtgacccacagaat

SEQ ID NO: 9569 - RNA, 21 nt, synthetic construct
  misc_feature 1..21: note = HBV-targeting guide sequence portion
  source 1..21: mol_type = other RNA
gaatccacactccaaaagaca

SEQ ID NO: 9570 - RNA, 21 nt, synthetic construct
  misc_feature 1..21: note = HBV-targeting guide sequence portion
  source 1..21: mol_type = other RNA
gaatcccagaggattgctggt

SEQ ID NO: 9571 - RNA, 21 nt, synthetic construct
  misc_feature 1..21: note = HBV-targeting guide sequence portion
  source 1..21: mol_type = other RNA
gaatcccgcggacgacccatc

SEQ ID NO: 9572 - RNA, 21 nt, synthetic construct
  misc_feature 1..21: note = HBV-targeting guide sequence portion
  source 1..21: mol_type = other RNA
gaatcctcacaataccgcaga

SEQ ID NO: 9573 - RNA, 21 nt, synthetic construct
  misc_feature 1..21: note = HBV-targeting guide sequence portion
  source 1..21: mol_type = other RNA
gaatcctgatgtgatgttctc

SEQ ID NO: 9574 - RNA, 21 nt, synthetic construct
  misc_feature 1..21: note = HBV-targeting guide sequence portion
  source 1..21: mol_type = other RNA
gaatctttccaccagcaatcc

SEQ ID NO: 9575 - RNA, 21 nt, synthetic construct
  misc_feature 1..21: note = HBV-targeting guide sequence portion
  source 1..21: mol_type = other RNA
gaatgaggcgctatgtgttga

SEQ ID NO: 9576 - RNA, 21 nt, synthetic construct
  misc_feature 1..21: note = HBV-targeting guide sequence portion
  source 1..21: mol_type = other RNA
gaatgctccagctcctacctt

SEQ ID NO: 9577 - RNA, 21 nt, synthetic construct
  misc_feature 1..21: note = HBV-targeting guide sequence portion
  source 1..21: mol_type = other RNA
gaatgtttcagaaaactcccg

SEQ ID NO: 9578 - RNA, 21 nt, synthetic construct
  misc_feature 1..21: note = HBV-targeting guide sequence portion
  source 1..21: mol_type = other RNA
gaatgtttgctccagaccggc

SEQ ID NO: 9579 - RNA, 21 nt, synthetic construct
  misc_feature 1..21: note = HBV-targeting guide sequence portion
  source 1..21: mol_type = other RNA
gaattagaggacagacgggaa

SEQ ID NO: 9580 - RNA, 21 nt, synthetic construct
  misc_feature 1..21: note = HBV-targeting guide sequence portion
  source 1..21: mol_type = other RNA
gaattgcttgcctgagtgcag

SEQ ID NO: 9581 - RNA, 21 nt, synthetic construct
  misc_feature 1..21: note = HBV-targeting guide sequence portion
  source 1..21: mol_type = other RNA
gaattggtgggcgttcacggt

SEQ ID NO: 9582 - RNA, 21 nt, synthetic construct
  misc_feature 1..21: note = HBV-targeting guide sequence portion
  source 1..21: mol_type = other RNA
gaattgtgggtcttctgggtt

SEQ ID NO: 9583 - RNA, 21 nt, synthetic construct
  misc_feature 1..21: note = HBV-targeting guide sequence portion
  source 1..21: mol_type = other RNA
gaatttaggataaaacctagc

SEQ ID NO: 9584 - RNA, 21 nt, synthetic construct
  misc_feature 1..21: note = HBV-targeting guide sequence portion
  source 1..21: mol_type = other RNA
gaatttggagctactgtggag

SEQ ID NO: 9585 - RNA, 21 nt, synthetic construct
  misc_feature 1..21: note = HBV-targeting guide sequence portion
  source 1..21: mol_type = other RNA
gaattttccgaaagcccagga

SEQ ID NO: 9586 - RNA, 21 nt, synthetic construct
  misc_feature 1..21: note = HBV-targeting guide sequence portion
  source 1..21: mol_type = other RNA
gaattttggccaagacacacg

SEQ ID NO: 9587 - RNA, 21 nt, synthetic construct
  misc_feature 1..21: note = HBV-targeting guide sequence portion
  source 1..21: mol_type = other RNA
gacaaaagaaaattggtaaca

SEQ ID NO: 9588 - RNA, 21 nt, synthetic construct
  misc_feature 1..21: note = HBV-targeting guide sequence portion
  source 1..21: mol_type = other RNA
gacaacagagttgtcagtccc

SEQ ID NO: 9589 - RNA, 21 nt, synthetic construct
  misc_feature 1..21: note = HBV-targeting guide sequence portion
  source 1..21: mol_type = other RNA
gacaactattgtggtttcaca

SEQ ID NO: 9590 - RNA, 21 nt, synthetic construct
  misc_feature 1..21: note = HBV-targeting guide sequence portion
  source 1..21: mol_type = other RNA
gacaactctgttgtcctctcc

SEQ ID NO: 9591 - RNA, 21 nt, synthetic construct
  misc_feature 1..21: note = HBV-targeting guide sequence portion
  source 1..21: mol_type = other RNA
gacaagaaatgtgaaaccaca

SEQ ID NO: 9592 - RNA, 21 nt, synthetic construct
  misc_feature 1..21: note = HBV-targeting guide sequence portion
  source 1..21: mol_type = other RNA
gacaagaatcctcacaatacc

SEQ ID NO: 9593 - RNA, 21 nt, synthetic construct
  misc_feature 1..21: note = HBV-targeting guide sequence portion
  source 1..21: mol_type = other RNA
gacaagttggaggacaggagg

SEQ ID NO: 9594 - RNA, 21 nt, synthetic construct
  misc_feature 1..21: note = HBV-targeting guide sequence portion
  source 1..21: mol_type = other RNA
gacacacggtagttcccccta

SEQ ID NO: 9595 - RNA, 21 nt, synthetic construct
  misc_feature 1..21: note = HBV-targeting guide sequence portion
  source 1..21: mol_type = other RNA
gacacactttccaatcaatag

SEQ ID NO: 9596 - RNA, 21 nt, synthetic construct
  misc_feature 1..21: note = HBV-targeting guide sequence portion
  source 1..21: mol_type = other RNA
gacacatccagcgataaccag

SEQ ID NO: 9597 - RNA, 21 nt, synthetic construct
  misc_feature 1..21: note = HBV-targeting guide sequence portion
  source 1..21: mol_type = other RNA
gacaccaaatactctaggacc

SEQ ID NO: 9598 - RNA, 21 nt, synthetic construct
  misc_feature 1..21: note = HBV-targeting guide sequence portion
  source 1..21: mol_type = other RNA
gacactatttacacactctat

SEQ ID NO: 9599 - RNA, 21 nt, synthetic construct
  misc_feature 1..21: note = HBV-targeting guide sequence portion
  source 1..21: mol_type = other RNA
gacactctcttatataaaaca

SEQ ID NO: 9600 - RNA, 21 nt, synthetic construct
  misc_feature 1..21: note = HBV-targeting guide sequence portion
  source 1..21: mol_type = other RNA
gacagacgggaaacatacctt

SEQ ID NO: 9601 - RNA, 21 nt, synthetic construct
  misc_feature 1..21: note = HBV-targeting guide sequence portion
  source 1..21: mol_type = other RNA
gacagcggggtaggctgccgt

SEQ ID NO: 9602 - RNA, 21 nt, synthetic construct
  misc_feature 1..21: note = HBV-targeting guide sequence portion
  source 1..21: mol_type = other RNA
gacaggaggttggtgagtgat

SEQ ID NO: 9603 - RNA, 21 nt, synthetic construct
  misc_feature 1..21: note = HBV-targeting guide sequence portion
  source 1..21: mol_type = other RNA
gacagggccccaagcggcctc

SEQ ID NO: 9604 - RNA, 21 nt, synthetic construct
  misc_feature 1..21: note = HBV-targeting guide sequence portion
  source 1..21: mol_type = other RNA
gacaggtacagtagaagaata

SEQ ID NO: 9605 - RNA, 21 nt, synthetic construct
  misc_feature 1..21: note = HBV-targeting guide sequence portion
  source 1..21: mol_type = other RNA
gacataactgactactaggtc

SEQ ID NO: 9606 - RNA, 21 nt, synthetic construct
  misc_feature 1..21: note = HBV-targeting guide sequence portion
  source 1..21: mol_type = other RNA
gacatagcccatgaaattaag

SEQ ID NO: 9607 - RNA, 21 nt, synthetic construct
  misc_feature 1..21: note = HBV-targeting guide sequence portion
  source 1..21: mol_type = other RNA
gacatgaacaagagatgatta

SEQ ID NO: 9608 - RNA, 21 nt, synthetic construct
  misc_feature 1..21: note = HBV-targeting guide sequence portion
  source 1..21: mol_type = other RNA
gacattgacccatataaagaa

SEQ ID NO: 9609 - RNA, 21 nt, synthetic construct
  misc_feature 1..21: note = HBV-targeting guide sequence portion
  source 1..21: mol_type = other RNA
gacattgcagagagtccaaga

SEQ ID NO: 9610 - RNA, 21 nt, synthetic construct
  misc_feature 1..21: note = HBV-targeting guide sequence portion
  source 1..21: mol_type = other RNA
gaccaagccccaaccagtggg

SEQ ID NO: 9611 - RNA, 21 nt, synthetic construct
  misc_feature 1..21: note = HBV-targeting guide sequence portion
  source 1..21: mol_type = other RNA
gaccaatttatgcctacagcc

SEQ ID NO: 9612 - RNA, 21 nt, synthetic construct
  misc_feature 1..21: note = HBV-targeting guide sequence portion
  source 1..21: mol_type = other RNA
gaccaccaaatgcccctatcc

SEQ ID NO: 9613 - RNA, 21 nt, synthetic construct
  misc_feature 1..21: note = HBV-targeting guide sequence portion
  source 1..21: mol_type = other RNA
gaccaccagttggacccagcc

SEQ ID NO: 9614 - RNA, 21 nt, synthetic construct
  misc_feature 1..21: note = HBV-targeting guide sequence portion
  source 1..21: mol_type = other RNA
gaccaccgtgaacgcccacca

SEQ ID NO: 9615 - RNA, 21 nt, synthetic construct
  misc_feature 1..21: note = HBV-targeting guide sequence portion
  source 1..21: mol_type = other RNA
gaccacggggcgcacctctct

SEQ ID NO: 9616 - RNA, 21 nt, synthetic construct
  misc_feature 1..21: note = HBV-targeting guide sequence portion
  source 1..21: mol_type = other RNA
gacccacaattcgttgacaca

SEQ ID NO: 9617 - RNA, 21 nt, synthetic construct
  misc_feature 1..21: note = HBV-targeting guide sequence portion
  source 1..21: mol_type = other RNA
gacccacagaatgaggcgcta

SEQ ID NO: 9618 - RNA, 21 nt, synthetic construct
  misc_feature 1..21: note = HBV-targeting guide sequence portion
  source 1..21: mol_type = other RNA
gacccagccttcagagcaaac

SEQ ID NO: 9619 - RNA, 21 nt, synthetic construct
  misc_feature 1..21: note = HBV-targeting guide sequence portion
  source 1..21: mol_type = other RNA
gacccatataaagaatttgga

SEQ ID NO: 9620 - RNA, 21 nt, synthetic construct
  misc_feature 1..21: note = HBV-targeting guide sequence portion
  source 1..21: mol_type = other RNA
gacccatctcgaggccgcttg

SEQ ID NO: 9621 - RNA, 21 nt, synthetic construct
  misc_feature 1..21: note = HBV-targeting guide sequence portion
  source 1..21: mol_type = other RNA
gacccctgctcgtgttacagg

SEQ ID NO: 9622 - RNA, 21 nt, synthetic construct
  misc_feature 1..21: note = HBV-targeting guide sequence portion
  source 1..21: mol_type = other RNA
gaccctgcagaacctgcacga

SEQ ID NO: 9623 - RNA, 21 nt, synthetic construct
  misc_feature 1..21: note = HBV-targeting guide sequence portion
  source 1..21: mol_type = other RNA
gaccctgcgctgaacatggag

SEQ ID NO: 9624 - RNA, 21 nt, synthetic construct
  misc_feature 1..21: note = HBV-targeting guide sequence portion
  source 1..21: mol_type = other RNA
gaccgaccacggggcgcacct

SEQ ID NO: 9625 - RNA, 21 nt, synthetic construct
  misc_feature 1..21: note = HBV-targeting guide sequence portion
  source 1..21: mol_type = other RNA
gaccgaccttgaggcatactt

SEQ ID NO: 9626 - RNA, 21 nt, synthetic construct
  misc_feature 1..21: note = HBV-targeting guide sequence portion
  source 1..21: mol_type = other RNA
gaccggctgcgagcaaaacaa

SEQ ID NO: 9627 - RNA, 21 nt, synthetic construct
  misc_feature 1..21: note = HBV-targeting guide sequence portion
  source 1..21: mol_type = other RNA
gaccgtgtgcacttcgcttca

SEQ ID NO: 9628 - RNA, 21 nt, synthetic construct
  misc_feature 1..21: note = HBV-targeting guide sequence portion
  source 1..21: mol_type = other RNA
gaccgtttctcttccaaaagt

SEQ ID NO: 9629 - RNA, 21 nt, synthetic construct
  misc_feature 1..21: note = HBV-targeting guide sequence portion
  source 1..21: mol_type = other RNA
gacctagtagtcagttatgtc

SEQ ID NO: 9630 - RNA, 21 nt, synthetic construct
  misc_feature 1..21: note = HBV-targeting guide sequence portion
  source 1..21: mol_type = other RNA
gacctgcctcgtcgtctaaca

SEQ ID NO: 9631 - RNA, 21 nt, synthetic construct
  misc_feature 1..21: note = HBV-targeting guide sequence portion
  source 1..21: mol_type = other RNA
gacctggccgttgcctggcaa

SEQ ID NO: 9632 - RNA, 21 nt, synthetic construct
  misc_feature 1..21: note = HBV-targeting guide sequence portion
  source 1..21: mol_type = other RNA
gaccttgaggcatacttcaaa

SEQ ID NO: 9633 - RNA, 21 nt, synthetic construct
  misc_feature 1..21: note = HBV-targeting guide sequence portion
  source 1..21: mol_type = other RNA
gaccttgggcaagaattggtg

SEQ ID NO: 9634 - RNA, 21 nt, synthetic construct
  misc_feature 1..21: note = HBV-targeting guide sequence portion
  source 1..21: mol_type = other RNA
gacgaagatctcaatcgccgc

SEQ ID NO: 9635 - RNA, 21 nt, synthetic construct
  misc_feature 1..21: note = HBV-targeting guide sequence portion
  source 1..21: mol_type = other RNA
gacgacagggccccaagcggc

SEQ ID NO: 9636 - RNA, 21 nt, synthetic construct
  misc_feature 1..21: note = HBV-targeting guide sequence portion
  source 1..21: mol_type = other RNA
gacgacccatctcgaggccgc

SEQ ID NO: 9637 - RNA, 21 nt, synthetic construct
  misc_feature 1..21: note = HBV-targeting guide sequence portion
  source 1..21: mol_type = other RNA
gacgacgaggcaggtccccta

SEQ ID NO: 9638 - RNA, 21 nt, synthetic construct
  misc_feature 1..21: note = HBV-targeting guide sequence portion
  source 1..21: mol_type = other RNA
gacgaggcaggtcccctagaa

SEQ ID NO: 9639 - RNA, 21 nt, synthetic construct
  misc_feature 1..21: note = HBV-targeting guide sequence portion
  source 1..21: mol_type = other RNA
gacgatatgtgagaggcagta

SEQ ID NO: 9640 - RNA, 21 nt, synthetic construct
  misc_feature 1..21: note = HBV-targeting guide sequence portion
  source 1..21: mol_type = other RNA
gacgccaacaaggtaggagct

SEQ ID NO: 9641 - RNA, 21 nt, synthetic construct
  misc_feature 1..21: note = HBV-targeting guide sequence portion
  source 1..21: mol_type = other RNA
gacgcggcgattgagatcttc

SEQ ID NO: 9642 - RNA, 21 nt, synthetic construct
  misc_feature 1..21: note = HBV-targeting guide sequence portion
  source 1..21: mol_type = other RNA
gacggcagcctaccccgctgt

SEQ ID NO: 9643 - RNA, 21 nt, synthetic construct
  misc_feature 1..21: note = HBV-targeting guide sequence portion
  source 1..21: mol_type = other RNA
gacgggaaacataccttgata

SEQ ID NO: 9644 - RNA, 21 nt, synthetic construct
  misc_feature 1..21: note = HBV-targeting guide sequence portion
  source 1..21: mol_type = other RNA
gacgggacgtaaacaaaggac

SEQ ID NO: 9645 - RNA, 21 nt, synthetic construct
  misc_feature 1..21: note = HBV-targeting guide sequence portion
  source 1..21: mol_type = other RNA
gacggggagtccgcgtaaaga

SEQ ID NO: 9646 - RNA, 21 nt, synthetic construct
  misc_feature 1..21: note = HBV-targeting guide sequence portion
  source 1..21: mol_type = other RNA
gacggttgaaattgattatgc

SEQ ID NO: 9647 - RNA, 21 nt, synthetic construct
  misc_feature 1..21: note = HBV-targeting guide sequence portion
  source 1..21: mol_type = other RNA
gacgtaaacaaaggacgtccc

SEQ ID NO: 9648 - RNA, 21 nt, synthetic construct
  misc_feature 1..21: note = HBV-targeting guide sequence portion
  source 1..21: mol_type = other RNA
gacgtcccgcgcaggatccag

SEQ ID NO: 9649 - RNA, 21 nt, synthetic construct
  misc_feature 1..21: note = HBV-targeting guide sequence portion
  source 1..21: mol_type = other RNA
gacgtcctttgtttacgtccc

SEQ ID NO: 9650 - RNA, 21 nt, synthetic construct
  misc_feature 1..21: note = HBV-targeting guide sequence portion
  source 1..21: mol_type = other RNA
gacgtgcagaggtgaagcgaa

SEQ ID NO: 9651 - RNA, 21 nt, synthetic construct
  misc_feature 1..21: note = HBV-targeting guide sequence portion
  source 1..21: mol_type = other RNA
gactactaggtccctagatgc

SEQ ID NO: 9652 - RNA, 21 nt, synthetic construct
  misc_feature 1..21: note = HBV-targeting guide sequence portion
  source 1..21: mol_type = other RNA
gactactgcctctcacatatc

SEQ ID NO: 9653 - RNA, 21 nt, synthetic construct
  misc_feature 1..21: note = HBV-targeting guide sequence portion
  source 1..21: mol_type = other RNA
gactatcaaggtatgtttccc

SEQ ID NO: 9654 - RNA, 21 nt, synthetic construct
  misc_feature 1..21: note = HBV-targeting guide sequence portion
  source 1..21: mol_type = other RNA
gactcaagatgctgtacagac

SEQ ID NO: 9655 - RNA, 21 nt, synthetic construct
  misc_feature 1..21: note = HBV-targeting guide sequence portion
  source 1..21: mol_type = other RNA
gactcataaggtgggaaattt

SEQ ID NO: 9656 - RNA, 21 nt, synthetic construct
  misc_feature 1..21: note = HBV-targeting guide sequence portion
  source 1..21: mol_type = other RNA
gactccaaggcatcccgatac

SEQ ID NO: 9657 - RNA, 21 nt, synthetic construct
  misc_feature 1..21: note = HBV-targeting guide sequence portion
  source 1..21: mol_type = other RNA
gactccccgtctgtgccttct

SEQ ID NO: 9658 - RNA, 21 nt, synthetic construct
  misc_feature 1..21: note = HBV-targeting guide sequence portion
  source 1..21: mol_type = other RNA
gactcctgctcaaggaacctc

SEQ ID NO: 9659 - RNA, 21 nt, synthetic construct
  misc_feature 1..21: note = HBV-targeting guide sequence portion
  source 1..21: mol_type = other RNA
gactcgtggtggacttctctc

SEQ ID NO: 9660 - RNA, 21 nt, synthetic construct
  misc_feature 1..21: note = HBV-targeting guide sequence portion
  source 1..21: mol_type = other RNA
gactctagctacctgggtggg

SEQ ID NO: 9661 - RNA, 21 nt, synthetic construct
  misc_feature 1..21: note = HBV-targeting guide sequence portion
  source 1..21: mol_type = other RNA
gactctctgcaatgtcaacga

SEQ ID NO: 9662 - RNA, 21 nt, synthetic construct
  misc_feature 1..21: note = HBV-targeting guide sequence portion
  source 1..21: mol_type = other RNA
gactctgcggtattgtgagga

SEQ ID NO: 9663 - RNA, 21 nt, synthetic construct
  misc_feature 1..21: note = HBV-targeting guide sequence portion
  source 1..21: mol_type = other RNA
gactcttggactctctgcaat

SEQ ID NO: 9664 - RNA, 21 nt, synthetic construct
  misc_feature 1..21: note = HBV-targeting guide sequence portion
  source 1..21: mol_type = other RNA
gactgacaactctgttgtcct

SEQ ID NO: 9665 - RNA, 21 nt, synthetic construct
  misc_feature 1..21: note = HBV-targeting guide sequence portion
  source 1..21: mol_type = other RNA
gactgcgaattttggccaaga

SEQ ID NO: 9666 - RNA, 21 nt, synthetic construct
  misc_feature 1..21: note = HBV-targeting guide sequence portion
  source 1..21: mol_type = other RNA
gactggcgattggtagaggca

SEQ ID NO: 9667 - RNA, 21 nt, synthetic construct
  misc_feature 1..21: note = HBV-targeting guide sequence portion
  source 1..21: mol_type = other RNA
gactgggaggagttgggggag

SEQ ID NO: 9668 - RNA, 21 nt, synthetic construct
  misc_feature 1..21: note = HBV-targeting guide sequence portion
  source 1..21: mol_type = other RNA
gactgtttgtttaaagactgg

SEQ ID NO: 9669 - RNA, 21 nt, synthetic construct
  misc_feature 1..21: note = HBV-targeting guide sequence portion
  source 1..21: mol_type = other RNA
gacttcaatcccaacaaggat

SEQ ID NO: 9670 - RNA, 21 nt, synthetic construct
  misc_feature 1..21: note = HBV-targeting guide sequence portion
  source 1..21: mol_type = other RNA
gacttctctcaattttctagg

SEQ ID NO: 9671 - RNA, 21 nt, synthetic construct
  misc_feature 1..21: note = HBV-targeting guide sequence portion
  source 1..21: mol_type = other RNA
gacttctttccttccgtacga

SEQ ID NO: 9672 - RNA, 21 nt, synthetic construct
  misc_feature 1..21: note = HBV-targeting guide sequence portion
  source 1..21: mol_type = other RNA
gacttggcccccaataccaca

SEQ ID NO: 9673 - RNA, 21 nt, synthetic construct
  misc_feature 1..21: note = HBV-targeting guide sequence portion
  source 1..21: mol_type = other RNA
gacttgtgttgttagacgacg

SEQ ID NO: 9674 - RNA, 21 nt, synthetic construct
  misc_feature 1..21: note = HBV-targeting guide sequence portion
  source 1..21: mol_type = other RNA
gagaaaagacggttgaaattg

SEQ ID NO: 9675 - RNA, 21 nt, synthetic construct
  misc_feature 1..21: note = HBV-targeting guide sequence portion
  source 1..21: mol_type = other RNA
gagaaacactcatcctcaggc

SEQ ID NO: 9676 - RNA, 21 nt, synthetic construct
  misc_feature 1..21: note = HBV-targeting guide sequence portion
  source 1..21: mol_type = other RNA
gagaaacgggctgaggcccac

SEQ ID NO: 9677 - RNA, 21 nt, synthetic construct
  misc_feature 1..21: note = HBV-targeting guide sequence portion
  source 1..21: mol_type = other RNA
gagaaacggtcctagagtatt

SEQ ID NO: 9678 - RNA, 21 nt, synthetic construct
  misc_feature 1..21: note = HBV-targeting guide sequence portion
  source 1..21: mol_type = other RNA
gagaacatcacatcaggattc

SEQ ID NO: 9679 - RNA, 21 nt, synthetic construct
  misc_feature 1..21: note = HBV-targeting guide sequence portion
  source 1..21: mol_type = other RNA
gagaactaatgactctagcta

SEQ ID NO: 9680 - RNA, 21 nt, synthetic construct
  misc_feature 1..21: note = HBV-targeting guide sequence portion
  source 1..21: mol_type = other RNA
gagaagaggacgacagggccc

SEQ ID NO: 9681 - RNA, 21 nt, synthetic construct
  misc_feature 1..21: note = HBV-targeting guide sequence portion
  source 1..21: mol_type = other RNA
gagaagattgacgatatgtga

SEQ ID NO: 9682 - RNA, 21 nt, synthetic construct
  misc_feature 1..21: note = HBV-targeting guide sequence portion
  source 1..21: mol_type = other RNA
gagaaggcacagacggggagt

SEQ ID NO: 9683 - RNA, 21 nt, synthetic construct
  misc_feature 1..21: note = HBV-targeting guide sequence portion
  source 1..21: mol_type = other RNA
gagaagtccaccacgagtcta

SEQ ID NO: 9684 - RNA, 21 nt, synthetic construct
  misc_feature 1..21: note = HBV-targeting guide sequence portion
  source 1..21: mol_type = other RNA
gagaataaccccatctctttg

SEQ ID NO: 9685 - RNA, 21 nt, synthetic construct
  misc_feature 1..21: note = HBV-targeting guide sequence portion
  source 1..21: mol_type = other RNA
gagaatgtttgctccagaccg

SEQ ID NO: 9686 - RNA, 21 nt, synthetic construct
  misc_feature 1..21: note = HBV-targeting guide sequence portion
  source 1..21: mol_type = other RNA
gagacagcggggtaggctgcc

SEQ ID NO: 9687 - RNA, 21 nt, synthetic construct
  misc_feature 1..21: note = HBV-targeting guide sequence portion
  source 1..21: mol_type = other RNA
gagaccaccgtgaacgcccac

SEQ ID NO: 9688 - RNA, 21 nt, synthetic construct
  misc_feature 1..21: note = HBV-targeting guide sequence portion
  source 1..21: mol_type = other RNA
gagactccaaggcatcccgat

SEQ ID NO: 9689 - RNA, 21 nt, synthetic construct
  misc_feature 1..21: note = HBV-targeting guide sequence portion
  source 1..21: mol_type = other RNA
gagacttgtgttgttagacga

SEQ ID NO: 9690 - RNA, 21 nt, synthetic construct
  misc_feature 1..21: note = HBV-targeting guide sequence portion
  source 1..21: mol_type = other RNA
gagagaagtccaccacgagtc

SEQ ID NO: 9691 - RNA, 21 nt, synthetic construct
  misc_feature 1..21: note = HBV-targeting guide sequence portion
  source 1..21: mol_type = other RNA
gagaggacaacagagttgtca

SEQ ID NO: 9692 - RNA, 21 nt, synthetic construct
  misc_feature 1..21: note = HBV-targeting guide sequence portion
  source 1..21: mol_type = other RNA
gagaggcagtagtcggaacag

SEQ ID NO: 9693 - RNA, 21 nt, synthetic construct
  misc_feature 1..21: note = HBV-targeting guide sequence portion
  source 1..21: mol_type = other RNA
gagaggcctgtatctccctgc

SEQ ID NO: 9694 - RNA, 21 nt, synthetic construct
  misc_feature 1..21: note = HBV-targeting guide sequence portion
  source 1..21: mol_type = other RNA
gagaggtgcgccccgtggtcg

SEQ ID NO: 9695 - RNA, 21 nt, synthetic construct
  misc_feature 1..21: note = HBV-targeting guide sequence portion
  source 1..21: mol_type = other RNA
gagagtaactccacagtagct

SEQ ID NO: 9696 - RNA, 21 nt, synthetic construct
  misc_feature 1..21: note = HBV-targeting guide sequence portion
  source 1..21: mol_type = other RNA
gagagtccaagagtcctctta

SEQ ID NO: 9697 - RNA, 21 nt, synthetic construct
  misc_feature 1..21: note = HBV-targeting guide sequence portion
  source 1..21: mol_type = other RNA
gagagtgtcaacacatagcgc

SEQ ID NO: 9698 - RNA, 21 nt, synthetic construct
  misc_feature 1..21: note = HBV-targeting guide sequence portion
  source 1..21: mol_type = other RNA
gagatacaggcctctcactct

SEQ ID NO: 9699 - RNA, 21 nt, synthetic construct
  misc_feature 1..21: note = HBV-targeting guide sequence portion
  source 1..21: mol_type = other RNA
gagatccccgagattgagatc

SEQ ID NO: 9700 - RNA, 21 nt, synthetic construct
  misc_feature 1..21: note = HBV-targeting guide sequence portion
  source 1..21: mol_type = other RNA
gagatcttcgtctgcgaggcg

SEQ ID NO: 9701 - RNA, 21 nt, synthetic construct
  misc_feature 1..21: note = HBV-targeting guide sequence portion
  source 1..21: mol_type = other RNA
gagatcttctagataccgccg

SEQ ID NO: 9702 - RNA, 21 nt, synthetic construct
  misc_feature 1..21: note = HBV-targeting guide sequence portion
  source 1..21: mol_type = other RNA
gagatcttctgcgacgcggcg

SEQ ID NO: 9703 - RNA, 21 nt, synthetic construct
  misc_feature 1..21: note = HBV-targeting guide sequence portion
  source 1..21: mol_type = other RNA
gagatgattaggcagaggtga

SEQ ID NO: 9704 - RNA, 21 nt, synthetic construct
  misc_feature 1..21: note = HBV-targeting guide sequence portion
  source 1..21: mol_type = other RNA
gagatggggttattctcttaa

SEQ ID NO: 9705 - RNA, 21 nt, synthetic construct
  misc_feature 1..21: note = HBV-targeting guide sequence portion
  source 1..21: mol_type = other RNA
gagatgggtcgtccgcgggat

SEQ ID NO: 9706 - RNA, 21 nt, synthetic construct
  misc_feature 1..21: note = HBV-targeting guide sequence portion
  source 1..21: mol_type = other RNA
gagattagattaatgatcttt

SEQ ID NO: 9707 - RNA, 21 nt, synthetic construct
  misc_feature 1..21: note = HBV-targeting guide sequence portion
  source 1..21: mol_type = other RNA
gagattgagatcttctgcgac

SEQ ID NO: 9708 - RNA, 21 nt, synthetic construct
  misc_feature 1..21: note = HBV-targeting guide sequence portion
  source 1..21: mol_type = other RNA
gagcaaaacaagcggctagga

SEQ ID NO: 9709 - RNA, 21 nt, synthetic construct
  misc_feature 1..21: note = HBV-targeting guide sequence portion
  source 1..21: mol_type = other RNA
gagcaaacattctcgggactg

SEQ ID NO: 9710 - RNA, 21 nt, synthetic construct
  misc_feature 1..21: note = HBV-targeting guide sequence portion
  source 1..21: mol_type = other RNA
gagcaaactccaacaatccag

SEQ ID NO: 9711 - RNA, 21 nt, synthetic construct
  misc_feature 1..21: note = HBV-targeting guide sequence portion
  source 1..21: mol_type = other RNA
gagcaggagtcgtgcaggttc

SEQ ID NO: 9712 - RNA, 21 nt, synthetic construct
  misc_feature 1..21: note = HBV-targeting guide sequence portion
  source 1..21: mol_type = other RNA
gagcaggggtcctaggaatcc

SEQ ID NO: 9713 - RNA, 21 nt, synthetic construct
  misc_feature 1..21: note = HBV-targeting guide sequence portion
  source 1..21: mol_type = other RNA
gagcattcgggctagggttca

SEQ ID NO: 9714 - RNA, 21 nt, synthetic construct
  misc_feature 1..21: note = HBV-targeting guide sequence portion
  source 1..21: mol_type = other RNA
gagcattgttcacctcaccat

SEQ ID NO: 9715 - RNA, 21 nt, synthetic construct
  misc_feature 1..21: note = HBV-targeting guide sequence portion
  source 1..21: mol_type = other RNA
gagccaagagaaacgggctga

SEQ ID NO: 9716 - RNA, 21 nt, synthetic construct
  misc_feature 1..21: note = HBV-targeting guide sequence portion
  source 1..21: mol_type = other RNA
gagccaccagcagggagatac

SEQ ID NO: 9717 - RNA, 21 nt, synthetic construct
  misc_feature 1..21: note = HBV-targeting guide sequence portion
  source 1..21: mol_type = other RNA
gagccctcaggctcagggcat

SEQ ID NO: 9718 - RNA, 21 nt, synthetic construct
  misc_feature 1..21: note = HBV-targeting guide sequence portion
  source 1..21: mol_type = other RNA
gagccggaaaggttccacgca

SEQ ID NO: 9719 - RNA, 21 nt, synthetic construct
  misc_feature 1..21: note = HBV-targeting guide sequence portion
  source 1..21: mol_type = other RNA
gagcctgagggctccacccca

SEQ ID NO: 9720 - RNA, 21 nt, synthetic construct
  misc_feature 1..21: note = HBV-targeting guide sequence portion
  source 1..21: mol_type = other RNA
gagctacagcatggggcagaa

SEQ ID NO: 9721 - RNA, 21 nt, synthetic construct
  misc_feature 1..21: note = HBV-targeting guide sequence portion
  source 1..21: mol_type = other RNA
gagctactgtggagttactct

SEQ ID NO: 9722 - RNA, 21 nt, synthetic construct
  misc_feature 1..21: note = HBV-targeting guide sequence portion
  source 1..21: mol_type = other RNA
gagctgcggcggtatctagaa

SEQ ID NO: 9723 - RNA, 21 nt, synthetic construct
  misc_feature 1..21: note = HBV-targeting guide sequence portion
  source 1..21: mol_type = other RNA
gagctggagcattcgggctag

SEQ ID NO: 9724 - RNA, 21 nt, synthetic construct
  misc_feature 1..21: note = HBV-targeting guide sequence portion
  source 1..21: mol_type = other RNA
gaggaagatgataaaacgccg

SEQ ID NO: 9725 - RNA, 21 nt, synthetic construct
  misc_feature 1..21: note = HBV-targeting guide sequence portion
  source 1..21: mol_type = other RNA
gaggacaacagagttgtcagt

SEQ ID NO: 9726 - RNA, 21 nt, synthetic construct
  misc_feature 1..21: note = HBV-targeting guide sequence portion
  source 1..21: mol_type = other RNA
gaggacagacgggaaacatac

SEQ ID NO: 9727 - RNA, 21 nt, synthetic construct
  misc_feature 1..21: note = HBV-targeting guide sequence portion
  source 1..21: mol_type = other RNA
gaggacaggaggttggtgagt

SEQ ID NO: 9728 - RNA, 21 nt, synthetic construct
  misc_feature 1..21: note = HBV-targeting guide sequence portion
  source 1..21: mol_type = other RNA
gaggacgacagggccccaagc

SEQ ID NO: 9729 - RNA, 21 nt, synthetic construct
  misc_feature 1..21: note = HBV-targeting guide sequence portion
  source 1..21: mol_type = other RNA
gaggactcttggactctctgc

SEQ ID NO: 9730 - RNA, 21 nt, synthetic construct
  misc_feature 1..21: note = HBV-targeting guide sequence portion
  source 1..21: mol_type = other RNA
gaggagattagattaatgatc

SEQ ID NO: 9731 - RNA, 21 nt, synthetic construct
  misc_feature 1..21: note = HBV-targeting guide sequence portion
  source 1..21: mol_type = other RNA
gaggagccggaaaggttccac

SEQ ID NO: 9732 - RNA, 21 nt, synthetic construct
  misc_feature 1..21: note = HBV-targeting guide sequence portion
  source 1..21: mol_type = other RNA
gaggagtgcgaatccacactc

SEQ ID NO: 9733 - RNA, 21 nt, synthetic construct
  misc_feature 1..21: note = HBV-targeting guide sequence portion
  source 1..21: mol_type = other RNA
gaggagttgggggaggagatt

SEQ ID NO: 9734 - RNA, 21 nt, synthetic construct
  misc_feature 1..21: note = HBV-targeting guide sequence portion
  source 1..21: mol_type = other RNA
gaggatgagtgtttctcagag

SEQ ID NO: 9735 - RNA, 21 nt, synthetic construct
  misc_feature 1..21: note = HBV-targeting guide sequence portion
  source 1..21: mol_type = other RNA
gaggattcttgtcaacaagga

SEQ ID NO: 9736 - RNA, 21 nt, synthetic construct
  misc_feature 1..21: note = HBV-targeting guide sequence portion
  source 1..21: mol_type = other RNA
gaggattgctggtggaaagat

SEQ ID NO: 9737 - RNA, 21 nt, synthetic construct
  misc_feature 1..21: note = HBV-targeting guide sequence portion
  source 1..21: mol_type = other RNA
gaggattggggaccctgcgct

SEQ ID NO: 9738 - RNA, 21 nt, synthetic construct
  misc_feature 1..21: note = HBV-targeting guide sequence portion
  source 1..21: mol_type = other RNA
gaggcaggaggcggatttgct

SEQ ID NO: 9739 - RNA, 21 nt, synthetic construct
  misc_feature 1..21: note = HBV-targeting guide sequence portion
  source 1..21: mol_type = other RNA
gaggcaggtcccctagaagaa

SEQ ID NO: 9740 - RNA, 21 nt, synthetic construct
  misc_feature 1..21: note = HBV-targeting guide sequence portion
  source 1..21: mol_type = other RNA
gaggcagtagtcggaacaggg

SEQ ID NO: 9741 - RNA, 21 nt, synthetic construct
  misc_feature 1..21: note = HBV-targeting guide sequence portion
  source 1..21: mol_type = other RNA
gaggcatacttcaaagactgt

SEQ ID NO: 9742 - RNA, 21 nt, synthetic construct
  misc_feature 1..21: note = HBV-targeting guide sequence portion
  source 1..21: mol_type = other RNA
gaggcatagcagcaggatgaa

SEQ ID NO: 9743 - RNA, 21 nt, synthetic construct
  misc_feature 1..21: note = HBV-targeting guide sequence portion
  source 1..21: mol_type = other RNA
gaggcccactcccataggaat

SEQ ID NO: 9744 - RNA, 21 nt, synthetic construct
  misc_feature 1..21: note = HBV-targeting guide sequence portion
  source 1..21: mol_type = other RNA
gaggccgcttggggccctgtc

SEQ ID NO: 9745 - RNA, 21 nt, synthetic construct
  misc_feature 1..21: note = HBV-targeting guide sequence portion
  source 1..21: mol_type = other RNA
gaggcctgtatctccctgctg

SEQ ID NO: 9746 - RNA, 21 nt, synthetic construct
  misc_feature 1..21: note = HBV-targeting guide sequence portion
  source 1..21: mol_type = other RNA
gaggccttttggggtggagcc

SEQ ID NO: 9747 - RNA, 21 nt, synthetic construct
  misc_feature 1..21: note = HBV-targeting guide sequence portion
  source 1..21: mol_type = other RNA
gaggcgagggagttcttcttc

SEQ ID NO: 9748 - RNA, 21 nt, synthetic construct
  misc_feature 1..21: note = HBV-targeting guide sequence portion
  source 1..21: mol_type = other RNA
gaggcgctatgtgttgacact

SEQ ID NO: 9749 - RNA, 21 nt, synthetic construct
  misc_feature 1..21: note = HBV-targeting guide sequence portion
  source 1..21: mol_type = other RNA
gaggcggatttgctggcaagg

SEQ ID NO: 9750 - RNA, 21 nt, synthetic construct
  misc_feature 1..21: note = HBV-targeting guide sequence portion
  source 1..21: mol_type = other RNA
gaggctgtaggcataaattgg

SEQ ID NO: 9751 - RNA, 21 nt, synthetic construct
  misc_feature 1..21: note = HBV-targeting guide sequence portion
  source 1..21: mol_type = other RNA
gaggcttgaacagtaggacat

SEQ ID NO: 9752 - RNA, 21 nt, synthetic construct
  misc_feature 1..21: note = HBV-targeting guide sequence portion
  source 1..21: mol_type = other RNA
gagggagttcttcttctaggg

SEQ ID NO: 9753 - RNA, 21 nt, synthetic construct
  misc_feature 1..21: note = HBV-targeting guide sequence portion
  source 1..21: mol_type = other RNA
gagggatacatagaggttcct

SEQ ID NO: 9754 - RNA, 21 nt, synthetic construct
  misc_feature 1..21: note = HBV-targeting guide sequence portion
  source 1..21: mol_type = other RNA
gagggctccaccccaaaaggc

SEQ ID NO: 9755 - RNA, 21 nt, synthetic construct
  misc_feature 1..21: note = HBV-targeting guide sequence portion
  source 1..21: mol_type = other RNA
gagggtgttttccaatgaggg

SEQ ID NO: 9756 - RNA, 21 nt, synthetic construct
  misc_feature 1..21: note = HBV-targeting guide sequence portion
  source 1..21: mol_type = other RNA
gagggttaaagacaggtacag

SEQ ID NO: 9757 - RNA, 21 nt, synthetic construct
  misc_feature 1..21: note = HBV-targeting guide sequence portion
  source 1..21: mol_type = other RNA
gaggtgaaaaagttgcatggt

SEQ ID NO: 9758 - RNA, 21 nt, synthetic construct
  misc_feature 1..21: note = HBV-targeting guide sequence portion
  source 1..21: mol_type = other RNA
gaggtgaacaatgctcaggag

SEQ ID NO: 9759 - RNA, 21 nt, synthetic construct
  misc_feature 1..21: note = HBV-targeting guide sequence portion
  source 1..21: mol_type = other RNA
gaggtgaagcgaagtgcacac

SEQ ID NO: 9760 - RNA, 21 nt, synthetic construct
  misc_feature 1..21: note = HBV-targeting guide sequence portion
  source 1..21: mol_type = other RNA
gaggtgcgccccgtggtcggt

SEQ ID NO: 9761 - RNA, 21 nt, synthetic construct
  misc_feature 1..21: note = HBV-targeting guide sequence portion
  source 1..21: mol_type = other RNA
gaggtggagacagcggggtag

SEQ ID NO: 9762 - RNA, 21 nt, synthetic construct
  misc_feature 1..21: note = HBV-targeting guide sequence portion
  source 1..21: mol_type = other RNA
gaggttccttgagcaggagtc

SEQ ID NO: 9763 - RNA, 21 nt, synthetic construct
  misc_feature 1..21: note = HBV-targeting guide sequence portion
  source 1..21: mol_type = other RNA
gaggttggggactgcgaattt

SEQ ID NO: 9764 - RNA, 21 nt, synthetic construct
  misc_feature 1..21: note = HBV-targeting guide sequence portion
  source 1..21: mol_type = other RNA
gaggttggtgagtgattggag

SEQ ID NO: 9765 - RNA, 21 nt, synthetic construct
  misc_feature 1..21: note = HBV-targeting guide sequence portion
  source 1..21: mol_type = other RNA
gagtaactccacagtagctcc

SEQ ID NO: 9766 - RNA, 21 nt, synthetic construct
  misc_feature 1..21: note = HBV-targeting guide sequence portion
  source 1..21: mol_type = other RNA
gagtatttggtgtcttttgga

SEQ ID NO: 9767 - RNA, 21 nt, synthetic construct
  misc_feature 1..21: note = HBV-targeting guide sequence portion
  source 1..21: mol_type = other RNA
gagtcattagttctccccagc

SEQ ID NO: 9768 - RNA, 21 nt, synthetic construct
  misc_feature 1..21: note = HBV-targeting guide sequence portion
  source 1..21: mol_type = other RNA
gagtccaagagtcctcttatg

SEQ ID NO: 9769 - RNA, 21 nt, synthetic construct
  misc_feature 1..21: note = HBV-targeting guide sequence portion
  source 1..21: mol_type = other RNA
gagtccaagggatactaacat

SEQ ID NO: 9770 - RNA, 21 nt, synthetic construct
  misc_feature 1..21: note = HBV-targeting guide sequence portion
  source 1..21: mol_type = other RNA
gagtccctttataccgctgtt

SEQ ID NO: 9771 - RNA, 21 nt, synthetic construct
  misc_feature 1..21: note = HBV-targeting guide sequence portion
  source 1..21: mol_type = other RNA
gagtccgcgtaaagagaggtg

SEQ ID NO: 9772 - RNA, 21 nt, synthetic construct
  misc_feature 1..21: note = HBV-targeting guide sequence portion
  source 1..21: mol_type = other RNA
gagtcctcttatgtaagacct

SEQ ID NO: 9773 - RNA, 21 nt, synthetic construct
  misc_feature 1..21: note = HBV-targeting guide sequence portion
  source 1..21: mol_type = other RNA
gagtcgtgcaggttctgcagg

SEQ ID NO: 9774 - RNA, 21 nt, synthetic construct
  misc_feature 1..21: note = HBV-targeting guide sequence portion
  source 1..21: mol_type = other RNA
gagtctagactcgtggtggac

SEQ ID NO: 9775 - RNA, 21 nt, synthetic construct
  misc_feature 1..21: note = HBV-targeting guide sequence portion
  source 1..21: mol_type = other RNA
gagtctagactctgcggtatt

SEQ ID NO: 9776 - RNA, 21 nt, synthetic construct
  misc_feature 1..21: note = HBV-targeting guide sequence portion
  source 1..21: mol_type = other RNA
gagtctcctgagcattgttca

SEQ ID NO: 9777 - RNA, 21 nt, synthetic construct
  misc_feature 1..21: note = HBV-targeting guide sequence portion
  source 1..21: mol_type = other RNA
gagtgagaggcctgtatctcc

SEQ ID NO: 9778 - RNA, 21 nt, synthetic construct
  misc_feature 1..21: note = HBV-targeting guide sequence portion
  source 1..21: mol_type = other RNA
gagtgattggaggttggggac

SEQ ID NO: 9779 - RNA, 21 nt, synthetic construct
  misc_feature 1..21: note = HBV-targeting guide sequence portion
  source 1..21: mol_type = other RNA
gagtgcagtatggtgaggtga

SEQ ID NO: 9780 - RNA, 21 nt, synthetic construct
  misc_feature 1..21: note = HBV-targeting guide sequence portion
  source 1..21: mol_type = other RNA
gagtgcgaatccacactccaa

SEQ ID NO: 9781 - RNA, 21 nt, synthetic construct
  misc_feature 1..21: note = HBV-targeting guide sequence portion
  source 1..21: mol_type = other RNA
gagtgggcctcagcccgtttc

SEQ ID NO: 9782 - RNA, 21 nt, synthetic construct
  misc_feature 1..21: note = HBV-targeting guide sequence portion
  source 1..21: mol_type = other RNA
gagtgtcaacacatagcgcct

SEQ ID NO: 9783 - RNA, 21 nt, synthetic construct
  misc_feature 1..21: note = HBV-targeting guide sequence portion
  source 1..21: mol_type = other RNA
gagtgtggattcgcactcctc

SEQ ID NO: 9784 - RNA, 21 nt, synthetic construct
  misc_feature 1..21: note = HBV-targeting guide sequence portion
  source 1..21: mol_type = other RNA
gagtgtgtaaatagtgtctag

SEQ ID NO: 9785 - RNA, 21 nt, synthetic construct
  misc_feature 1..21: note = HBV-targeting guide sequence portion
  source 1..21: mol_type = other RNA
gagtgttgacataactgacta

SEQ ID NO: 9786 - RNA, 21 nt, synthetic construct
  misc_feature 1..21: note = HBV-targeting guide sequence portion
  source 1..21: mol_type = other RNA
gagtgtttctcagaggtggag

SEQ ID NO: 9787 - RNA, 21 nt, synthetic construct
  misc_feature 1..21: note = HBV-targeting guide sequence portion
  source 1..21: mol_type = other RNA
gagttactctcgtttttgcct

SEQ ID NO: 9788 - RNA, 21 nt, synthetic construct
  misc_feature 1..21: note = HBV-targeting guide sequence portion
  source 1..21: mol_type = other RNA
gagttccgcagtatggatcgg

SEQ ID NO: 9789 - RNA, 21 nt, synthetic construct
  misc_feature 1..21: note = HBV-targeting guide sequence portion
  source 1..21: mol_type = other RNA
gagttcttcttctaggggacc

SEQ ID NO: 9790 - RNA, 21 nt, synthetic construct
  misc_feature 1..21: note = HBV-targeting guide sequence portion
  source 1..21: mol_type = other RNA
gagttgggggaggagattaga

SEQ ID NO: 9791 - RNA, 21 nt, synthetic construct
  misc_feature 1..21: note = HBV-targeting guide sequence portion
  source 1..21: mol_type = other RNA
gagttgtcagtcccgagaatg

SEQ ID NO: 9792 - RNA, 21 nt, synthetic construct
  misc_feature 1..21: note = HBV-targeting guide sequence portion
  source 1..21: mol_type = other RNA
gagtttgctctgaaggctggg

SEQ ID NO: 9793 - RNA, 21 nt, synthetic construct
  misc_feature 1..21: note = HBV-targeting guide sequence portion
  source 1..21: mol_type = other RNA
gagttttctgaaacattcttt

SEQ ID NO: 9794 - RNA, 21 nt, synthetic construct
  misc_feature 1..21: note = HBV-targeting guide sequence portion
  source 1..21: mol_type = other RNA
gataaaacctagcaggcataa

SEQ ID NO: 9795 - RNA, 21 nt, synthetic construct
  misc_feature 1..21: note = HBV-targeting guide sequence portion
  source 1..21: mol_type = other RNA
gataaaacgccgcagacacat

SEQ ID NO: 9796 - RNA, 21 nt, synthetic construct
  misc_feature 1..21: note = HBV-targeting guide sequence portion
  source 1..21: mol_type = other RNA
gataaccacattgtgtaaaag

SEQ ID NO: 9797 - RNA, 21 nt, synthetic construct
  misc_feature 1..21: note = HBV-targeting guide sequence portion
  source 1..21: mol_type = other RNA
gataaccaggacaagttggag

SEQ ID NO: 9798 - RNA, 21 nt, synthetic construct
  misc_feature 1..21: note = HBV-targeting guide sequence portion
  source 1..21: mol_type = other RNA
gataagggtattaaaccttat

SEQ ID NO: 9799 - RNA, 21 nt, synthetic construct
  misc_feature 1..21: note = HBV-targeting guide sequence portion
  source 1..21: mol_type = other RNA
gataataaggtttaataccct

SEQ ID NO: 9800 - RNA, 21 nt, synthetic construct
  misc_feature 1..21: note = HBV-targeting guide sequence portion
  source 1..21: mol_type = other RNA
gataatatcttggtgtagatg

SEQ ID NO: 9801 - RNA, 21 nt, synthetic construct
  misc_feature 1..21: note = HBV-targeting guide sequence portion
  source 1..21: mol_type = other RNA
gatacagagctgcggcggtat

SEQ ID NO: 9802 - RNA, 21 nt, synthetic construct
  misc_feature 1..21: note = HBV-targeting guide sequence portion
  source 1..21: mol_type = other RNA
gatacaggcctctcactctgg

SEQ ID NO: 9803 - RNA, 21 nt, synthetic construct
  misc_feature 1..21: note = HBV-targeting guide sequence portion
  source 1..21: mol_type = other RNA
gatacatagaggttccttgag

SEQ ID NO: 9804 - RNA, 21 nt, synthetic construct
  misc_feature 1..21: note = HBV-targeting guide sequence portion
  source 1..21: mol_type = other RNA
gataccgccgcagctctgtat

SEQ ID NO: 9805 - RNA, 21 nt, synthetic construct
  misc_feature 1..21: note = HBV-targeting guide sequence portion
  source 1..21: mol_type = other RNA
gatactaacattgagatcccc

SEQ ID NO: 9806 - RNA, 21 nt, synthetic construct
  misc_feature 1..21: note = HBV-targeting guide sequence portion
  source 1..21: mol_type = other RNA
gataggataggggcatttggt

SEQ ID NO: 9807 - RNA, 21 nt, synthetic construct
  misc_feature 1..21: note = HBV-targeting guide sequence portion
  source 1..21: mol_type = other RNA
gataggggcatttggtggtct

SEQ ID NO: 9808 - RNA, 21 nt, synthetic construct
  misc_feature 1..21: note = HBV-targeting guide sequence portion
  source 1..21: mol_type = other RNA
gatagtccagaagaaccaaca

SEQ ID NO: 9809 - RNA, 21 nt, synthetic construct
  misc_feature 1..21: note = HBV-targeting guide sequence portion
  source 1..21: mol_type = other RNA
gatatgtgagaggcagtagtc

SEQ ID NO: 9810 - RNA, 21 nt, synthetic construct
  misc_feature 1..21: note = HBV-targeting guide sequence portion
  source 1..21: mol_type = other RNA
gatattatcaaaaaatgtgaa

SEQ ID NO: 9811 - RNA, 21 nt, synthetic construct
  misc_feature 1..21: note = HBV-targeting guide sequence portion
  source 1..21: mol_type = other RNA
gatcaagcatctagggaccta

SEQ ID NO: 9812 - RNA, 21 nt, synthetic construct
  misc_feature 1..21: note = HBV-targeting guide sequence portion
  source 1..21: mol_type = other RNA
gatcatcaaccaccagcacgg

SEQ ID NO: 9813 - RNA, 21 nt, synthetic construct
  misc_feature 1..21: note = HBV-targeting guide sequence portion
  source 1..21: mol_type = other RNA
gatcattaatctaatctcctc

SEQ ID NO: 9814 - RNA, 21 nt, synthetic construct
  misc_feature 1..21: note = HBV-targeting guide sequence portion
  source 1..21: mol_type = other RNA
gatcattgccacaaaatcaca

SEQ ID NO: 9815 - RNA, 21 nt, synthetic construct
  misc_feature 1..21: note = HBV-targeting guide sequence portion
  source 1..21: mol_type = other RNA
gatccagttggcagcacagcc

SEQ ID NO: 9816 - RNA, 21 nt, synthetic construct
  misc_feature 1..21: note = HBV-targeting guide sequence portion
  source 1..21: mol_type = other RNA
gatccatactgcggaactcct

SEQ ID NO: 9817 - RNA, 21 nt, synthetic construct
  misc_feature 1..21: note = HBV-targeting guide sequence portion
  source 1..21: mol_type = other RNA
gatcccagagtgagaggcctg

SEQ ID NO: 9818 - RNA, 21 nt, synthetic construct
  misc_feature 1..21: note = HBV-targeting guide sequence portion
  source 1..21: mol_type = other RNA
gatccccaacaatcaatgaca

SEQ ID NO: 9819 - RNA, 21 nt, synthetic construct
  misc_feature 1..21: note = HBV-targeting guide sequence portion
  source 1..21: mol_type = other RNA
gatccccgagattgagatctt

SEQ ID NO: 9820 - RNA, 21 nt, synthetic construct
  misc_feature 1..21: note = HBV-targeting guide sequence portion
  source 1..21: mol_type = other RNA
gatccctggccagacgccaac

SEQ ID NO: 9821 - RNA, 21 nt, synthetic construct
  misc_feature 1..21: note = HBV-targeting guide sequence portion
  source 1..21: mol_type = other RNA
gatcctgcgcgggacgtcctt

SEQ ID NO: 9822 - RNA, 21 nt, synthetic construct
  misc_feature 1..21: note = HBV-targeting guide sequence portion
  source 1..21: mol_type = other RNA
gatcctggaattagaggacag

SEQ ID NO: 9823 - RNA, 21 nt, synthetic construct
  misc_feature 1..21: note = HBV-targeting guide sequence portion
  source 1..21: mol_type = other RNA
gatccttgttgggattgaagt

SEQ ID NO: 9824 - RNA, 21 nt, synthetic construct
  misc_feature 1..21: note = HBV-targeting guide sequence portion
  source 1..21: mol_type = other RNA
gatcggcagaggagccggaaa

SEQ ID NO: 9825 - RNA, 21 nt, synthetic construct
  misc_feature 1..21: note = HBV-targeting guide sequence portion
  source 1..21: mol_type = other RNA
gatctcaatcgccgcgtcgca

SEQ ID NO: 9826 - RNA, 21 nt, synthetic construct
  misc_feature 1..21: note = HBV-targeting guide sequence portion
  source 1..21: mol_type = other RNA
gatctcaatctcggggatctc

SEQ ID NO: 9827 - RNA, 21 nt, synthetic construct
  misc_feature 1..21: note = HBV-targeting guide sequence portion
  source 1..21: mol_type = other RNA
gatctcaatgttagtatccct

SEQ ID NO: 9828 - RNA, 21 nt, synthetic construct
  misc_feature 1..21: note = HBV-targeting guide sequence portion
  source 1..21: mol_type = other RNA
gatctcgtacggaaggaaaga

SEQ ID NO: 9829 - RNA, 21 nt, synthetic construct
  misc_feature 1..21: note = HBV-targeting guide sequence portion
  source 1..21: mol_type = other RNA
gatcttcgtctgcgaggcgag

SEQ ID NO: 9830 - RNA, 21 nt, synthetic construct
  misc_feature 1..21: note = HBV-targeting guide sequence portion
  source 1..21: mol_type = other RNA
gatcttctaaattagtaccca

SEQ ID NO: 9831 - RNA, 21 nt, synthetic construct
  misc_feature 1..21: note = HBV-targeting guide sequence portion
  source 1..21: mol_type = other RNA
gatcttctagataccgccgca

SEQ ID NO: 9832 - RNA, 21 nt, synthetic construct
  misc_feature 1..21: note = HBV-targeting guide sequence portion
  source 1..21: mol_type = other RNA
gatcttctgcgacgcggcgat

SEQ ID NO: 9833 - RNA, 21 nt, synthetic construct
  misc_feature 1..21: note = HBV-targeting guide sequence portion
  source 1..21: mol_type = other RNA
gatcttgcagagtttggtgga

SEQ ID NO: 9834 - RNA, 21 nt, synthetic construct
  misc_feature 1..21: note = HBV-targeting guide sequence portion
  source 1..21: mol_type = other RNA
gatctttgtactaggaggctg

SEQ ID NO: 9835 - RNA, 21 nt, synthetic construct
  misc_feature 1..21: note = HBV-targeting guide sequence portion
  source 1..21: mol_type = other RNA
gatgaagaggaagatgataaa

SEQ ID NO: 9836 - RNA, 21 nt, synthetic construct
  misc_feature 1..21: note = HBV-targeting guide sequence portion
  source 1..21: mol_type = other RNA
gatgagaaggcacagacgggg

SEQ ID NO: 9837 - RNA, 21 nt, synthetic construct
  misc_feature 1..21: note = HBV-targeting guide sequence portion
  source 1..21: mol_type = other RNA
gatgaggcatagcagcaggat

SEQ ID NO: 9838 - RNA, 21 nt, synthetic construct
  misc_feature 1..21: note = HBV-targeting guide sequence portion
  source 1..21: mol_type = other RNA
gatgagtgtttctcagaggtg

SEQ ID NO: 9839 - RNA, 21 nt, synthetic construct
  misc_feature 1..21: note = HBV-targeting guide sequence portion
  source 1..21: mol_type = other RNA
gatgataaaacgccgcagaca

SEQ ID NO: 9840 - RNA, 21 nt, synthetic construct
  misc_feature 1..21: note = HBV-targeting guide sequence portion
  source 1..21: mol_type = other RNA
gatgatcctggaattagagga

SEQ ID NO: 9841 - RNA, 21 nt, synthetic construct
  misc_feature 1..21: note = HBV-targeting guide sequence portion
  source 1..21: mol_type = other RNA
gatgatgggatgggaatacag

SEQ ID NO: 9842 - RNA, 21 nt, synthetic construct
  misc_feature 1..21: note = HBV-targeting guide sequence portion
  source 1..21: mol_type = other RNA
gatgatgtggtattgggggcc

SEQ ID NO: 9843 - RNA, 21 nt, synthetic construct
  misc_feature 1..21: note = HBV-targeting guide sequence portion
  source 1..21: mol_type = other RNA
gatgattaggcagaggtgaaa

SEQ ID NO: 9844 - RNA, 21 nt, synthetic construct
  misc_feature 1..21: note = HBV-targeting guide sequence portion
  source 1..21: mol_type = other RNA
gatgcaacccccactggttgg

SEQ ID NO: 9845 - RNA, 21 nt, synthetic construct
  misc_feature 1..21: note = HBV-targeting guide sequence portion
  source 1..21: mol_type = other RNA
gatgccttggagtctcctgag

SEQ ID NO: 9846 - RNA, 21 nt, synthetic construct
  misc_feature 1..21: note = HBV-targeting guide sequence portion
  source 1..21: mol_type = other RNA
gatgctgtacagacttggccc

SEQ ID NO: 9847 - RNA, 21 nt, synthetic construct
  misc_feature 1..21: note = HBV-targeting guide sequence portion
  source 1..21: mol_type = other RNA
gatgcttgatcttctaaatta

SEQ ID NO: 9848 - RNA, 21 nt, synthetic construct
  misc_feature 1..21: note = HBV-targeting guide sequence portion
  source 1..21: mol_type = other RNA
gatggaaactgcacctgtatt

SEQ ID NO: 9849 - RNA, 21 nt, synthetic construct
  misc_feature 1..21: note = HBV-targeting guide sequence portion
  source 1..21: mol_type = other RNA
gatggcctatgaccaagcccc

SEQ ID NO: 9850 - RNA, 21 nt, synthetic construct
  misc_feature 1..21: note = HBV-targeting guide sequence portion
  source 1..21: mol_type = other RNA
gatgggaatacaggtgcagtt

SEQ ID NO: 9851 - RNA, 21 nt, synthetic construct
  misc_feature 1..21: note = HBV-targeting guide sequence portion
  source 1..21: mol_type = other RNA
gatgggatgggaatacaggtg

SEQ ID NO: 9852 - RNA, 21 nt, synthetic construct
  misc_feature 1..21: note = HBV-targeting guide sequence portion
  source 1..21: mol_type = other RNA
gatggggttattctcttaatt

SEQ ID NO: 9853 - RNA, 21 nt, synthetic construct
  misc_feature 1..21: note = HBV-targeting guide sequence portion
  source 1..21: mol_type = other RNA
gatgggtcgtccgcgggattc

SEQ ID NO: 9854 - RNA, 21 nt, synthetic construct
  misc_feature 1..21: note = HBV-targeting guide sequence portion
  source 1..21: mol_type = other RNA
gatgtatattaggaaaagagg

SEQ ID NO: 9855 - RNA, 21 nt, synthetic construct
  misc_feature 1..21: note = HBV-targeting guide sequence portion
  source 1..21: mol_type = other RNA
gatgtatatttgcgggagagg

SEQ ID NO: 9856 - RNA, 21 nt, synthetic construct
  misc_feature 1..21: note = HBV-targeting guide sequence portion
  source 1..21: mol_type = other RNA
gatgtgatgttctccatgttc

SEQ ID NO: 9857 - RNA, 21 nt, synthetic construct
  misc_feature 1..21: note = HBV-targeting guide sequence portion
  source 1..21: mol_type = other RNA
gatgtgattttgtggcaatga

SEQ ID NO: 9858 - RNA, 21 nt, synthetic construct
  misc_feature 1..21: note = HBV-targeting guide sequence portion
  source 1..21: mol_type = other RNA
gatgtggtattgggggccaag

SEQ ID NO: 9859 - RNA, 21 nt, synthetic construct
  misc_feature 1..21: note = HBV-targeting guide sequence portion
  source 1..21: mol_type = other RNA
gatgtgtctgcggcgttttat

SEQ ID NO: 9860 - RNA, 21 nt, synthetic construct
  misc_feature 1..21: note = HBV-targeting guide sequence portion
  source 1..21: mol_type = other RNA
gatgttctccatgttcagcgc

SEQ ID NO: 9861 - RNA, 21 nt, synthetic construct
  misc_feature 1..21: note = HBV-targeting guide sequence portion
  source 1..21: mol_type = other RNA
gatgttctggataataaggtt

SEQ ID NO: 9862 - RNA, 21 nt, synthetic construct
  misc_feature 1..21: note = HBV-targeting guide sequence portion
  source 1..21: mol_type = other RNA
gattaactagatgttctggat

SEQ ID NO: 9863 - RNA, 21 nt, synthetic construct
  misc_feature 1..21: note = HBV-targeting guide sequence portion
  source 1..21: mol_type = other RNA
gattaatgatctttgtactag

SEQ ID NO: 9864 - RNA, 21 nt, synthetic construct
  misc_feature 1..21: note = HBV-targeting guide sequence portion
  source 1..21: mol_type = other RNA
gattagattaatgatctttgt

SEQ ID NO: 9865 - RNA, 21 nt, synthetic construct
  misc_feature 1..21: note = HBV-targeting guide sequence portion
  source 1..21: mol_type = other RNA
gattaggcagaggtgaaaaag

SEQ ID NO: 9866 - RNA, 21 nt, synthetic construct
  misc_feature 1..21: note = HBV-targeting guide sequence portion
  source 1..21: mol_type = other RNA
gattatgcctgctaggtttta

SEQ ID NO: 9867 - RNA, 21 nt, synthetic construct
  misc_feature 1..21: note = HBV-targeting guide sequence portion
  source 1..21: mol_type = other RNA
gattcagcgccgacgggacgt

SEQ ID NO: 9868 - RNA, 21 nt, synthetic construct
  misc_feature 1..21: note = HBV-targeting guide sequence portion
  source 1..21: mol_type = other RNA
gattcctaggacccctgctcg

SEQ ID NO: 9869 - RNA, 21 nt, synthetic construct
  misc_feature 1..21: note = HBV-targeting guide sequence portion
  source 1..21: mol_type = other RNA
gattcgcactcctccagctta

SEQ ID NO: 9870 - RNA, 21 nt, synthetic construct
  misc_feature 1..21: note = HBV-targeting guide sequence portion
  source 1..21: mol_type = other RNA
gattctgccccatgctgtagc

SEQ ID NO: 9871 - RNA, 21 nt, synthetic construct
  misc_feature 1..21: note = HBV-targeting guide sequence portion
  source 1..21: mol_type = other RNA
gattcttgtcaacaaggaaaa

SEQ ID NO: 9872 - RNA, 21 nt, synthetic construct
  misc_feature 1..21: note = HBV-targeting guide sequence portion
  source 1..21: mol_type = other RNA
gattctttcccgaccaccagt

SEQ ID NO: 9873 - RNA, 21 nt, synthetic construct
  misc_feature 1..21: note = HBV-targeting guide sequence portion
  source 1..21: mol_type = other RNA
gattgaagtcccaatctggat

SEQ ID NO: 9874 - RNA, 21 nt, synthetic construct
  misc_feature 1..21: note = HBV-targeting guide sequence portion
  source 1..21: mol_type = other RNA
gattgaatacatgcatacaag

SEQ ID NO: 9875 - RNA, 21 nt, synthetic construct
  misc_feature 1..21: note = HBV-targeting guide sequence portion
  source 1..21: mol_type = other RNA
gattgacgatatgtgagaggc

SEQ ID NO: 9876 - RNA, 21 nt, synthetic construct
  misc_feature 1..21: note = HBV-targeting guide sequence portion
  source 1..21: mol_type = other RNA
gattgagatcttcgtctgcga

SEQ ID NO: 9877 - RNA, 21 nt, synthetic construct
  misc_feature 1..21: note = HBV-targeting guide sequence portion
  source 1..21: mol_type = other RNA
gattgagatcttctgcgacgc

SEQ ID NO: 9878 - RNA, 21 nt, synthetic construct
  misc_feature 1..21: note = HBV-targeting guide sequence portion
  source 1..21: mol_type = other RNA
gattgctggtggaaagattct

SEQ ID NO: 9879 - RNA, 21 nt, synthetic construct
  misc_feature 1..21: note = HBV-targeting guide sequence portion
  source 1..21: mol_type = other RNA
gattggaaagtgtgtcaacga

SEQ ID NO: 9880 - RNA, 21 nt, synthetic construct
  misc_feature 1..21: note = HBV-targeting guide sequence portion
  source 1..21: mol_type = other RNA
gattggaggttggggactgcg

SEQ ID NO: 9881 - RNA, 21 nt, synthetic construct
  misc_feature 1..21: note = HBV-targeting guide sequence portion
  source 1..21: mol_type = other RNA
gattgggacttcaatcccaac

SEQ ID NO: 9882 - RNA, 21 nt, synthetic construct
  misc_feature 1..21: note = HBV-targeting guide sequence portion
  source 1..21: mol_type = other RNA
gattggggaccctgcgctgaa

SEQ ID NO: 9883 - RNA, 21 nt, synthetic construct
  misc_feature 1..21: note = HBV-targeting guide sequence portion
  source 1..21: mol_type = other RNA
gattggtagaggcaggaggcg

SEQ ID NO: 9884 - RNA, 21 nt, synthetic construct
  misc_feature 1..21: note = HBV-targeting guide sequence portion
  source 1..21: mol_type = other RNA
gattgttggagtttgctctga

SEQ ID NO: 9885 - RNA, 21 nt, synthetic construct
  misc_feature 1..21: note = HBV-targeting guide sequence portion
  source 1..21: mol_type = other RNA
gattgttggggatcattgcca

SEQ ID NO: 9886 - RNA, 21 nt, synthetic construct
  misc_feature 1..21: note = HBV-targeting guide sequence portion
  source 1..21: mol_type = other RNA
gatttgctggcaaggtttgca

SEQ ID NO: 9887 - RNA, 21 nt, synthetic construct
  misc_feature 1..21: note = HBV-targeting guide sequence portion
  source 1..21: mol_type = other RNA
gattttgtggcaatgatcccc

SEQ ID NO: 9888 - RNA, 21 nt, synthetic construct
  misc_feature 1..21: note = HBV-targeting guide sequence portion
  source 1..21: mol_type = other RNA
gattttgtgtatgatgtgatt

SEQ ID NO: 9889 - RNA, 21 nt, synthetic construct
  misc_feature 1..21: note = HBV-targeting guide sequence portion
  source 1..21: mol_type = other RNA
gcaaaaacgagagtaactcca

SEQ ID NO: 9890 - RNA, 21 nt, synthetic construct
  misc_feature 1..21: note = HBV-targeting guide sequence portion
  source 1..21: mol_type = other RNA
gcaaaacaagcggctaggagt

SEQ ID NO: 9891 - RNA, 21 nt, synthetic construct
  misc_feature 1..21: note = HBV-targeting guide sequence portion
  source 1..21: mol_type = other RNA
gcaaaacccagaagacccaca

SEQ ID NO: 9892 - RNA, 21 nt, synthetic construct
  misc_feature 1..21: note = HBV-targeting guide sequence portion
  source 1..21: mol_type = other RNA
gcaaacacttggcacagacct

SEQ ID NO: 9893 - RNA, 21 nt, synthetic construct
  misc_feature 1..21: note = HBV-targeting guide sequence portion
  source 1..21: mol_type = other RNA
gcaaacattctcgggactgac

SEQ ID NO: 9894 - RNA, 21 nt, synthetic construct
  misc_feature 1..21: note = HBV-targeting guide sequence portion
  source 1..21: mol_type = other RNA
gcaaaccttgccagcaaatcc

SEQ ID NO: 9895 - RNA, 21 nt, synthetic construct
  misc_feature 1..21: note = HBV-targeting guide sequence portion
  source 1..21: mol_type = other RNA
gcaaactccaacaatccagat

SEQ ID NO: 9896 - RNA, 21 nt, synthetic construct
  misc_feature 1..21: note = HBV-targeting guide sequence portion
  source 1..21: mol_type = other RNA
gcaaagaattgcttgcctgag

SEQ ID NO: 9897 - RNA, 21 nt, synthetic construct
  misc_feature 1..21: note = HBV-targeting guide sequence portion
  source 1..21: mol_type = other RNA
gcaaatatacatcgttcccat

SEQ ID NO: 9898 - RNA, 21 nt, synthetic construct
  misc_feature 1..21: note = HBV-targeting guide sequence portion
  source 1..21: mol_type = other RNA
gcaaatccgcctcctgcctct

SEQ ID NO: 9899 - RNA, 21 nt, synthetic construct
  misc_feature 1..21: note = HBV-targeting guide sequence portion
  source 1..21: mol_type = other RNA
gcaacaggagggatacataga

SEQ ID NO: 9900 - RNA, 21 nt, synthetic construct
  misc_feature 1..21: note = HBV-targeting guide sequence portion
  source 1..21: mol_type = other RNA
gcaacccccactggttggggc

SEQ ID NO: 9901 - RNA, 21 nt, synthetic construct
  misc_feature 1..21: note = HBV-targeting guide sequence portion
  source 1..21: mol_type = other RNA
gcaacggccaggtctgtgcca

SEQ ID NO: 9902 - RNA, 21 nt, synthetic construct
  misc_feature 1..21: note = HBV-targeting guide sequence portion
  source 1..21: mol_type = other RNA
gcaacggggtaaaggttcagg

SEQ ID NO: 9903 - RNA, 21 nt, synthetic construct
  misc_feature 1..21: note = HBV-targeting guide sequence portion
  source 1..21: mol_type = other RNA
gcaactttttcacctctgcct

SEQ ID NO: 9904 - RNA, 21 nt, synthetic construct
  misc_feature 1..21: note = HBV-targeting guide sequence portion
  source 1..21: mol_type = other RNA
gcaagaattggtgggcgttca

SEQ ID NO: 9905 - RNA, 21 nt, synthetic construct
  misc_feature 1..21: note = HBV-targeting guide sequence portion
  source 1..21: mol_type = other RNA
gcaagatcccagagtgagagg

SEQ ID NO: 9906 - RNA, 21 nt, synthetic construct
  misc_feature 1..21: note = HBV-targeting guide sequence portion
  source 1..21: mol_type = other RNA
gcaagcaattctttgctgggg

SEQ ID NO: 9907 - RNA, 21 nt, synthetic construct
  misc_feature 1..21: note = HBV-targeting guide sequence portion
  source 1..21: mol_type = other RNA
gcaaggtttgcattatgccct

SEQ ID NO: 9908 - RNA, 21 nt, synthetic construct
  misc_feature 1..21: note = HBV-targeting guide sequence portion
  source 1..21: mol_type = other RNA
gcaagtatttggtgaatttag

SEQ ID NO: 9909 - RNA, 21 nt, synthetic construct
  misc_feature 1..21: note = HBV-targeting guide sequence portion
  source 1..21: mol_type = other RNA
gcaatcctctgggattctttc

SEQ ID NO: 9910 - RNA, 21 nt, synthetic construct
  misc_feature 1..21: note = HBV-targeting guide sequence portion
  source 1..21: mol_type = other RNA
gcaatgatccccaacaatcaa

SEQ ID NO: 9911 - RNA, 21 nt, synthetic construct
  misc_feature 1..21: note = HBV-targeting guide sequence portion
  source 1..21: mol_type = other RNA
gcaatgtcaacgaccgacctt

SEQ ID NO: 9912 - RNA, 21 nt, synthetic construct
  misc_feature 1..21: note = HBV-targeting guide sequence portion
  source 1..21: mol_type = other RNA
gcaattctttgctggggagaa

SEQ ID NO: 9913 - RNA, 21 nt, synthetic construct
  misc_feature 1..21: note = HBV-targeting guide sequence portion
  source 1..21: mol_type = other RNA
gcacacggtccggcagatgag

SEQ ID NO: 9914 - RNA, 21 nt, synthetic construct
  misc_feature 1..21: note = HBV-targeting guide sequence portion
  source 1..21: mol_type = other RNA
gcacagacctggccgttgcct

SEQ ID NO: 9915 - RNA, 21 nt, synthetic construct
  misc_feature 1..21: note = HBV-targeting guide sequence portion
  source 1..21: mol_type = other RNA
gcacagacggggagtccgcgt

SEQ ID NO: 9916 - RNA, 21 nt, synthetic construct
  misc_feature 1..21: note = HBV-targeting guide sequence portion
  source 1..21: mol_type = other RNA
gcacagcctagcagccatggg

SEQ ID NO: 9917 - RNA, 21 nt, synthetic construct
  misc_feature 1..21: note = HBV-targeting guide sequence portion
  source 1..21: mol_type = other RNA
gcacagcttggaggcttgaac

SEQ ID NO: 9918 - RNA, 21 nt, synthetic construct
  misc_feature 1..21: note = HBV-targeting guide sequence portion
  source 1..21: mol_type = other RNA
gcaccagcaccatgcaacttt

SEQ ID NO: 9919 - RNA, 21 nt, synthetic construct
  misc_feature 1..21: note = HBV-targeting guide sequence portion
  source 1..21: mol_type = other RNA
gcaccatgcaactttttcacc

SEQ ID NO: 9920 - RNA, 21 nt, synthetic construct
  misc_feature 1..21: note = HBV-targeting guide sequence portion
  source 1..21: mol_type = other RNA
gcacctctctttacgcggact

SEQ ID NO: 9921 - RNA, 21 nt, synthetic construct
  misc_feature 1..21: note = HBV-targeting guide sequence portion
  source 1..21: mol_type = other RNA
gcacctgtattcccatcccat

SEQ ID NO: 9922 - RNA, 21 nt, synthetic construct
  misc_feature 1..21: note = HBV-targeting guide sequence portion
  source 1..21: mol_type = other RNA
gcacgactcctgctcaaggaa

SEQ ID NO: 9923 - RNA, 21 nt, synthetic construct
  misc_feature 1..21: note = HBV-targeting guide sequence portion
  source 1..21: mol_type = other RNA
gcacggaggccttttggggtg

SEQ ID NO: 9924 - RNA, 21 nt, synthetic construct
  misc_feature 1..21: note = HBV-targeting guide sequence portion
  source 1..21: mol_type = other RNA
gcacgggaccctgcagaacct

SEQ ID NO: 9925 - RNA, 21 nt, synthetic construct
  misc_feature 1..21: note = HBV-targeting guide sequence portion
  source 1..21: mol_type = other RNA
gcacgtcgcatggagaccacc

SEQ ID NO: 9926 - RNA, 21 nt, synthetic construct
  misc_feature 1..21: note = HBV-targeting guide sequence portion
  source 1..21: mol_type = other RNA
gcactagtaaactgagccaag

SEQ ID NO: 9927 - RNA, 21 nt, synthetic construct
  misc_feature 1..21: note = HBV-targeting guide sequence portion
  source 1..21: mol_type = other RNA
gcactcaggcaagcaattctt

SEQ ID NO: 9928 - RNA, 21 nt, synthetic construct
  misc_feature 1..21: note = HBV-targeting guide sequence portion
  source 1..21: mol_type = other RNA
gcactcctccagcttatagac

SEQ ID NO: 9929 - RNA, 21 nt, synthetic construct
  misc_feature 1..21: note = HBV-targeting guide sequence portion
  source 1..21: mol_type = other RNA
gcacttcgcttcacctctgca

SEQ ID NO: 9930 - RNA, 21 nt, synthetic construct
  misc_feature 1..21: note = HBV-targeting guide sequence portion
  source 1..21: mol_type = other RNA
gcagaacctgcacgactcctg

SEQ ID NO: 9931 - RNA, 21 nt, synthetic construct
  misc_feature 1..21: note = HBV-targeting guide sequence portion
  source 1..21: mol_type = other RNA
gcagaagatctcaatctcggg

SEQ ID NO: 9932 - RNA, 21 nt, synthetic construct
  misc_feature 1..21: note = HBV-targeting guide sequence portion
  source 1..21: mol_type = other RNA
gcagaatctttccaccagcaa

SEQ ID NO: 9933 - RNA, 21 nt, synthetic construct
  misc_feature 1..21: note = HBV-targeting guide sequence portion
  source 1..21: mol_type = other RNA
gcagacacatccagcgataac

SEQ ID NO: 9934 - RNA, 21 nt, synthetic construct
  misc_feature 1..21: note = HBV-targeting guide sequence portion
  source 1..21: mol_type = other RNA
gcagaccaatttatgcctaca

SEQ ID NO: 9935 - RNA, 21 nt, synthetic construct
  misc_feature 1..21: note = HBV-targeting guide sequence portion
  source 1..21: mol_type = other RNA
gcagacgaagatctcaatcgc

SEQ ID NO: 9936 - RNA, 21 nt, synthetic construct
  misc_feature 1..21: note = HBV-targeting guide sequence portion
  source 1..21: mol_type = other RNA
gcagagaagaggacgacaggg

SEQ ID NO: 9937 - RNA, 21 nt, synthetic construct
  misc_feature 1..21: note = HBV-targeting guide sequence portion
  source 1..21: mol_type = other RNA
gcagagagtccaagagtcctc

SEQ ID NO: 9938 - RNA, 21 nt, synthetic construct
  misc_feature 1..21: note = HBV-targeting guide sequence portion
  source 1..21: mol_type = other RNA
gcagaggagccggaaaggttc

SEQ ID NO: 9939 - RNA, 21 nt, synthetic construct
  misc_feature 1..21: note = HBV-targeting guide sequence portion
  source 1..21: mol_type = other RNA
gcagaggtgaaaaagttgcat

SEQ ID NO: 9940 - RNA, 21 nt, synthetic construct
  misc_feature 1..21: note = HBV-targeting guide sequence portion
  source 1..21: mol_type = other RNA
gcagaggtgaagcgaagtgca

SEQ ID NO: 9941 - RNA, 21 nt, synthetic construct
  misc_feature 1..21: note = HBV-targeting guide sequence portion
  source 1..21: mol_type = other RNA
gcagagtctagactcgtggtg

SEQ ID NO: 9942 - RNA, 21 nt, synthetic construct
  misc_feature 1..21: note = HBV-targeting guide sequence portion
  source 1..21: mol_type = other RNA
gcagagtttggtggaaggttg

SEQ ID NO: 9943 - RNA, 21 nt, synthetic construct
  misc_feature 1..21: note = HBV-targeting guide sequence portion
  source 1..21: mol_type = other RNA
gcagatgagaaggcacagacg

SEQ ID NO: 9944 - RNA, 21 nt, synthetic construct
  misc_feature 1..21: note = HBV-targeting guide sequence portion
  source 1..21: mol_type = other RNA
gcagcaaaacccagaagaccc

SEQ ID NO: 9945 - RNA, 21 nt, synthetic construct
  misc_feature 1..21: note = HBV-targeting guide sequence portion
  source 1..21: mol_type = other RNA
gcagcacagcctagcagccat

SEQ ID NO: 9946 - RNA, 21 nt, synthetic construct
  misc_feature 1..21: note = HBV-targeting guide sequence portion
  source 1..21: mol_type = other RNA
gcagcaggatgaagaggaaga

SEQ ID NO: 9947 - RNA, 21 nt, synthetic construct
  misc_feature 1..21: note = HBV-targeting guide sequence portion
  source 1..21: mol_type = other RNA
gcagccatgggaacgatgtat

SEQ ID NO: 9948 - RNA, 21 nt, synthetic construct
  misc_feature 1..21: note = HBV-targeting guide sequence portion
  source 1..21: mol_type = other RNA
gcagccggtctggagcaaaca

SEQ ID NO: 9949 - RNA, 21 nt, synthetic construct
  misc_feature 1..21: note = HBV-targeting guide sequence portion
  source 1..21: mol_type = other RNA
gcagcctaccccgctgtctcc

SEQ ID NO: 9950 - RNA, 21 nt, synthetic construct
  misc_feature 1..21: note = HBV-targeting guide sequence portion
  source 1..21: mol_type = other RNA
gcagctctgtatcgggatgcc

SEQ ID NO: 9951 - RNA, 21 nt, synthetic construct
  misc_feature 1..21: note = HBV-targeting guide sequence portion
  source 1..21: mol_type = other RNA
gcaggaggcggatttgctggc

SEQ ID NO: 9952 - RNA, 21 nt, synthetic construct
  misc_feature 1..21: note = HBV-targeting guide sequence portion
  source 1..21: mol_type = other RNA
gcaggagtcgtgcaggttctg

SEQ ID NO: 9953 - RNA, 21 nt, synthetic construct
  misc_feature 1..21: note = HBV-targeting guide sequence portion
  source 1..21: mol_type = other RNA
gcaggataaccacattgtgta

SEQ ID NO: 9954 - RNA, 21 nt, synthetic construct
  misc_feature 1..21: note = HBV-targeting guide sequence portion
  source 1..21: mol_type = other RNA
gcaggatccagttggcagcac

SEQ ID NO: 9955 - RNA, 21 nt, synthetic construct
  misc_feature 1..21: note = HBV-targeting guide sequence portion
  source 1..21: mol_type = other RNA
gcaggatgaagaggaagatga

SEQ ID NO: 9956 - RNA, 21 nt, synthetic construct
  misc_feature 1..21: note = HBV-targeting guide sequence portion
  source 1..21: mol_type = other RNA
gcaggcagagaagaggacgac

SEQ ID NO: 9957 - RNA, 21 nt, synthetic construct
  misc_feature 1..21: note = HBV-targeting guide sequence portion
  source 1..21: mol_type = other RNA
gcaggcataatcaatttcaac

SEQ ID NO: 9958 - RNA, 21 nt, synthetic construct
  misc_feature 1..21: note = HBV-targeting guide sequence portion
  source 1..21: mol_type = other RNA
gcaggctttcactttttcgcc

SEQ ID NO: 9959 - RNA, 21 nt, synthetic construct
  misc_feature 1..21: note = HBV-targeting guide sequence portion
  source 1..21: mol_type = other RNA
gcagggagatacaggcctctc

SEQ ID NO: 9960 - RNA, 21 nt, synthetic construct
  misc_feature 1..21: note = HBV-targeting guide sequence portion
  source 1..21: mol_type = other RNA
gcaggggtcctaggaatcctg

SEQ ID NO: 9961 - RNA, 21 nt, synthetic construct
  misc_feature 1..21: note = HBV-targeting guide sequence portion
  source 1..21: mol_type = other RNA
gcagggtccccaatcctcgag

SEQ ID NO: 9962 - RNA, 21 nt, synthetic construct
  misc_feature 1..21: note = HBV-targeting guide sequence portion
  source 1..21: mol_type = other RNA
gcagggtcccgtgctggtggt

SEQ ID NO: 9963 - RNA, 21 nt, synthetic construct
  misc_feature 1..21: note = HBV-targeting guide sequence portion
  source 1..21: mol_type = other RNA
gcaggtcccctagaagaagaa

SEQ ID NO: 9964 - RNA, 21 nt, synthetic construct
  misc_feature 1..21: note = HBV-targeting guide sequence portion
  source 1..21: mol_type = other RNA
gcaggttctgcagggtcccgt

SEQ ID NO: 9965 - RNA, 21 nt, synthetic construct
  misc_feature 1..21: note = HBV-targeting guide sequence portion
  source 1..21: mol_type = other RNA
gcagtagtcggaacagggttt

SEQ ID NO: 9966 - RNA, 21 nt, synthetic construct
  misc_feature 1..21: note = HBV-targeting guide sequence portion
  source 1..21: mol_type = other RNA
gcagtatggatcggcagagga

SEQ ID NO: 9967 - RNA, 21 nt, synthetic construct
  misc_feature 1..21: note = HBV-targeting guide sequence portion
  source 1..21: mol_type = other RNA
gcagtatggtgaggtgaacaa

SEQ ID NO: 9968 - RNA, 21 nt, synthetic construct
  misc_feature 1..21: note = HBV-targeting guide sequence portion
  source 1..21: mol_type = other RNA
gcagtccccaacctccaatca

SEQ ID NO: 9969 - RNA, 21 nt, synthetic construct
  misc_feature 1..21: note = HBV-targeting guide sequence portion
  source 1..21: mol_type = other RNA
gcagtttccatccgaaggttt

SEQ ID NO: 9970 - RNA, 21 nt, synthetic construct
  misc_feature 1..21: note = HBV-targeting guide sequence portion
  source 1..21: mol_type = other RNA
gcataaattggtctgcgcacc

SEQ ID NO: 9971 - RNA, 21 nt, synthetic construct
  misc_feature 1..21: note = HBV-targeting guide sequence portion
  source 1..21: mol_type = other RNA
gcataatcaatttcaaccgtc

SEQ ID NO: 9972 - RNA, 21 nt, synthetic construct
  misc_feature 1..21: note = HBV-targeting guide sequence portion
  source 1..21: mol_type = other RNA
gcataatgcaaaccttgccag

SEQ ID NO: 9973 - RNA, 21 nt, synthetic construct
  misc_feature 1..21: note = HBV-targeting guide sequence portion
  source 1..21: mol_type = other RNA
gcatacaagggcattaaagca

SEQ ID NO: 9974 - RNA, 21 nt, synthetic construct
  misc_feature 1..21: note = HBV-targeting guide sequence portion
  source 1..21: mol_type = other RNA
gcatacttcaaagactgtttg

SEQ ID NO: 9975 - RNA, 21 nt, synthetic construct
  misc_feature 1..21: note = HBV-targeting guide sequence portion
  source 1..21: mol_type = other RNA
gcatagcagcaggatgaagag

SEQ ID NO: 9976 - RNA, 21 nt, synthetic construct
  misc_feature 1..21: note = HBV-targeting guide sequence portion
  source 1..21: mol_type = other RNA
gcatcagcaaacacttggcac

SEQ ID NO: 9977 - RNA, 21 nt, synthetic construct
  misc_feature 1..21: note = HBV-targeting guide sequence portion
  source 1..21: mol_type = other RNA
gcatcccgatacagagctgcg

SEQ ID NO: 9978 - RNA, 21 nt, synthetic construct
  misc_feature 1..21: note = HBV-targeting guide sequence portion
  source 1..21: mol_type = other RNA
gcatctagggacctagtagtc

SEQ ID NO: 9979 - RNA, 21 nt, synthetic construct
  misc_feature 1..21: note = HBV-targeting guide sequence portion
  source 1..21: mol_type = other RNA
gcatcttgagtccctttatac

SEQ ID NO: 9980 - RNA, 21 nt, synthetic construct
  misc_feature 1..21: note = HBV-targeting guide sequence portion
  source 1..21: mol_type = other RNA
gcatgcgctgatggcctatga

SEQ ID NO: 9981 - RNA, 21 nt, synthetic construct
  misc_feature 1..21: note = HBV-targeting guide sequence portion
  source 1..21: mol_type = other RNA
gcatgcgtggaacctttccgg

SEQ ID NO: 9982 - RNA, 21 nt, synthetic construct
  misc_feature 1..21: note = HBV-targeting guide sequence portion
  source 1..21: mol_type = other RNA
gcatggacattgacccatata

SEQ ID NO: 9983 - RNA, 21 nt, synthetic construct
  misc_feature 1..21: note = HBV-targeting guide sequence portion
  source 1..21: mol_type = other RNA
gcatggagaccaccgtgaacg

SEQ ID NO: 9984 - RNA, 21 nt, synthetic construct
  misc_feature 1..21: note = HBV-targeting guide sequence portion
  source 1..21: mol_type = other RNA
gcatggcctgaggatgagtgt

SEQ ID NO: 9985 - RNA, 21 nt, synthetic construct
  misc_feature 1..21: note = HBV-targeting guide sequence portion
  source 1..21: mol_type = other RNA
gcatggggcagaatctttcca

SEQ ID NO: 9986 - RNA, 21 nt, synthetic construct
  misc_feature 1..21: note = HBV-targeting guide sequence portion
  source 1..21: mol_type = other RNA
gcatggtgctggtgcgcagac

SEQ ID NO: 9987 - RNA, 21 nt, synthetic construct
  misc_feature 1..21: note = HBV-targeting guide sequence portion
  source 1..21: mol_type = other RNA
gcatgtattcaatctaagcag

SEQ ID NO: 9988 - RNA, 21 nt, synthetic construct
  misc_feature 1..21: note = HBV-targeting guide sequence portion
  source 1..21: mol_type = other RNA
gcattaaagcaggataaccac

SEQ ID NO: 9989 - RNA, 21 nt, synthetic construct
  misc_feature 1..21: note = HBV-targeting guide sequence portion
  source 1..21: mol_type = other RNA
gcattatgccctgagcctgag

SEQ ID NO: 9990 - RNA, 21 nt, synthetic construct
  misc_feature 1..21: note = HBV-targeting guide sequence portion
  source 1..21: mol_type = other RNA
gcattcgggctagggttcacc

SEQ ID NO: 9991 - RNA, 21 nt, synthetic construct
  misc_feature 1..21: note = HBV-targeting guide sequence portion
  source 1..21: mol_type = other RNA
gcattgttcacctcaccatac

SEQ ID NO: 9992 - RNA, 21 nt, synthetic construct
  misc_feature 1..21: note = HBV-targeting guide sequence portion
  source 1..21: mol_type = other RNA
gcatttggtggtctataagct

SEQ ID NO: 9993 - RNA, 21 nt, synthetic construct
  misc_feature 1..21: note = HBV-targeting guide sequence portion
  source 1..21: mol_type = other RNA
gccaaaattcgcagtccccaa

SEQ ID NO: 9994 - RNA, 21 nt, synthetic construct
  misc_feature 1..21: note = HBV-targeting guide sequence portion
  source 1..21: mol_type = other RNA
gccaaacagtgggggaaagcc

SEQ ID NO: 9995 - RNA, 21 nt, synthetic construct
  misc_feature 1..21: note = HBV-targeting guide sequence portion
  source 1..21: mol_type = other RNA
gccaacaaggtaggagctgga

SEQ ID NO: 9996 - RNA, 21 nt, synthetic construct
  misc_feature 1..21: note = HBV-targeting guide sequence portion
  source 1..21: mol_type = other RNA
gccaactggatcctgcgcggg

SEQ ID NO: 9997 - RNA, 21 nt, synthetic construct
  misc_feature 1..21: note = HBV-targeting guide sequence portion
  source 1..21: mol_type = other RNA
gccaacttacaaggcctttct

SEQ ID NO: 9998 - RNA, 21 nt, synthetic construct
  misc_feature 1..21: note = HBV-targeting guide sequence portion
  source 1..21: mol_type = other RNA
gccaagacacacggtagttcc

SEQ ID NO: 9999 - RNA, 21 nt, synthetic construct
  misc_feature 1..21: note = HBV-targeting guide sequence portion
  source 1..21: mol_type = other RNA
gccaagagaaacgggctgagg

SEQ ID NO: 10000 - RNA, 21 nt, synthetic construct
  misc_feature 1..21: note = HBV-targeting guide sequence portion
  source 1..21: mol_type = other RNA
gccaagtctgtacagcatctt

SEQ ID NO: 10001 - RNA, 21 nt, synthetic construct
  misc_feature 1..21: note = HBV-targeting guide sequence portion
  source 1..21: mol_type = other RNA
gccaagtgtttgctgatgcaa

SEQ ID NO: 10002 - RNA, 21 nt, synthetic construct
  misc_feature 1..21: note = HBV-targeting guide sequence portion
  source 1..21: mol_type = other RNA
gccacaaaatcacatcataca

SEQ ID NO: 10003 - RNA, 21 nt, synthetic construct
  misc_feature 1..21: note = HBV-targeting guide sequence portion
  source 1..21: mol_type = other RNA
gccaccagcagggagatacag

SEQ ID NO: 10004 - RNA, 21 nt, synthetic construct
  misc_feature 1..21: note = HBV-targeting guide sequence portion
  source 1..21: mol_type = other RNA
gccacccaaggcacagcttgg

SEQ ID NO: 10005 - RNA, 21 nt, synthetic construct
  misc_feature 1..21: note = HBV-targeting guide sequence portion
  source 1..21: mol_type = other RNA
gccagacgccaacaaggtagg

SEQ ID NO: 10006 - RNA, 21 nt, synthetic construct
  misc_feature 1..21: note = HBV-targeting guide sequence portion
  source 1..21: mol_type = other RNA
gccagcaaatccgcctcctgc

SEQ ID NO: 10007 - RNA, 21 nt, synthetic construct
  misc_feature 1..21: note = HBV-targeting guide sequence portion
  source 1..21: mol_type = other RNA
gccaggcaacggccaggtctg

SEQ ID NO: 10008 - RNA, 21 nt, synthetic construct
  misc_feature 1..21: note = HBV-targeting guide sequence portion
  source 1..21: mol_type = other RNA
gccagggatccttgttgggat

SEQ ID NO: 10009 - RNA, 21 nt, synthetic construct
  misc_feature 1..21: note = HBV-targeting guide sequence portion
  source 1..21: mol_type = other RNA
gccaggtctgtgccaagtgtt

SEQ ID NO: 10010 - RNA, 21 nt, synthetic construct
  misc_feature 1..21: note = HBV-targeting guide sequence portion
  source 1..21: mol_type = other RNA
gccagtcaggacggcagccta

SEQ ID NO: 10011 - RNA, 21 nt, synthetic construct
  misc_feature 1..21: note = HBV-targeting guide sequence portion
  source 1..21: mol_type = other RNA
gccatcagcgcatgcgtggaa

SEQ ID NO: 10012 - RNA, 21 nt, synthetic construct
  misc_feature 1..21: note = HBV-targeting guide sequence portion
  source 1..21: mol_type = other RNA
gccatgggaacgatgtatatt

SEQ ID NO: 10013 - RNA, 21 nt, synthetic construct
  misc_feature 1..21: note = HBV-targeting guide sequence portion
  source 1..21: mol_type = other RNA
gccatttgttcagtggttcgt

SEQ ID NO: 10014 - RNA, 21 nt, synthetic construct
  misc_feature 1..21: note = HBV-targeting guide sequence portion
  source 1..21: mol_type = other RNA
gcccaaggtcttacataagag

SEQ ID NO: 10015 - RNA, 21 nt, synthetic construct
  misc_feature 1..21: note = HBV-targeting guide sequence portion
  source 1..21: mol_type = other RNA
gcccaccaattcttgcccaag

SEQ ID NO: 10016 - RNA, 21 nt, synthetic construct
  misc_feature 1..21: note = HBV-targeting guide sequence portion
  source 1..21: mol_type = other RNA
gcccactcccataggaatttt

SEQ ID NO: 10017 - RNA, 21 nt, synthetic construct
  misc_feature 1..21: note = HBV-targeting guide sequence portion
  source 1..21: mol_type = other RNA
gcccaggatgatgggatggga

SEQ ID NO: 10018 - RNA, 21 nt, synthetic construct
  misc_feature 1..21: note = HBV-targeting guide sequence portion
  source 1..21: mol_type = other RNA
gcccatatgagtgttgacata

SEQ ID NO: 10019 - RNA, 21 nt, synthetic construct
  misc_feature 1..21: note = HBV-targeting guide sequence portion
  source 1..21: mol_type = other RNA
gcccatgaaattaagagaata

SEQ ID NO: 10020 - RNA, 21 nt, synthetic construct
  misc_feature 1..21: note = HBV-targeting guide sequence portion
  source 1..21: mol_type = other RNA
gccccaaccagtgggggttgc

SEQ ID NO: 10021 - RNA, 21 nt, synthetic construct
  misc_feature 1..21: note = HBV-targeting guide sequence portion
  source 1..21: mol_type = other RNA
gccccaagcggcctcgagatg

SEQ ID NO: 10022 - RNA, 21 nt, synthetic construct
  misc_feature 1..21: note = HBV-targeting guide sequence portion
  source 1..21: mol_type = other RNA
gccccatgctgtagctcttgt

SEQ ID NO: 10023 - RNA, 21 nt, synthetic construct
  misc_feature 1..21: note = HBV-targeting guide sequence portion
  source 1..21: mol_type = other RNA
gcccccaataccacatcatcc

SEQ ID NO: 10024 - RNA, 21 nt, synthetic construct
  misc_feature 1..21: note = HBV-targeting guide sequence portion
  source 1..21: mol_type = other RNA
gccccgtaaaatttcccacct

SEQ ID NO: 10025 - RNA, 21 nt, synthetic construct
  misc_feature 1..21: note = HBV-targeting guide sequence portion
  source 1..21: mol_type = other RNA
gccccgtggtcggtcggaacg

SEQ ID NO: 10026 - RNA, 21 nt, synthetic construct
  misc_feature 1..21: note = HBV-targeting guide sequence portion
  source 1..21: mol_type = other RNA
gcccctatcctatcaacactt

SEQ ID NO: 10027 - RNA, 21 nt, synthetic construct
  misc_feature 1..21: note = HBV-targeting guide sequence portion
  source 1..21: mol_type = other RNA
gccccttttacacaatgtggt

SEQ ID NO: 10028 - RNA, 21 nt, synthetic construct
  misc_feature 1..21: note = HBV-targeting guide sequence portion
  source 1..21: mol_type = other RNA
gcccgaatgctccagctccta

SEQ ID NO: 10029 - RNA, 21 nt, synthetic construct
  misc_feature 1..21: note = HBV-targeting guide sequence portion
  source 1..21: mol_type = other RNA
gcccgcttacagttaatgaga

SEQ ID NO: 10030 - RNA, 21 nt, synthetic construct
  misc_feature 1..21: note = HBV-targeting guide sequence portion
  source 1..21: mol_type = other RNA
gcccgtttctcttggctcagt

SEQ ID NO: 10031 - RNA, 21 nt, synthetic construct
  misc_feature 1..21: note = HBV-targeting guide sequence portion
  source 1..21: mol_type = other RNA
gccctaaagccacccaaggca

SEQ ID NO: 10032 - RNA, 21 nt, synthetic construct
  misc_feature 1..21: note = HBV-targeting guide sequence portion
  source 1..21: mol_type = other RNA
gccctacgaaccactgaacaa

SEQ ID NO: 10033 - RNA, 21 nt, synthetic construct
  misc_feature 1..21: note = HBV-targeting guide sequence portion
  source 1..21: mol_type = other RNA
gccctcaggctcagggcataa

SEQ ID NO: 10034 - RNA, 21 nt, synthetic construct
  misc_feature 1..21: note = HBV-targeting guide sequence portion
  source 1..21: mol_type = other RNA
gccctgagcctgagggctcca

SEQ ID NO: 10035 - RNA, 21 nt, synthetic construct
  misc_feature 1..21: note = HBV-targeting guide sequence portion
  source 1..21: mol_type = other RNA
gccctgtcgtcctcttctctg

SEQ ID NO: 10036 - RNA, 21 nt, synthetic construct
  misc_feature 1..21: note = HBV-targeting guide sequence portion
  source 1..21: mol_type = other RNA
gcccttggataagggtattaa

SEQ ID NO: 10037 - RNA, 21 nt, synthetic construct
  misc_feature 1..21: note = HBV-targeting guide sequence portion
  source 1..21: mol_type = other RNA
gcccttgtatgcatgtattca

SEQ ID NO: 10038 - RNA, 21 nt, synthetic construct
  misc_feature 1..21: note = HBV-targeting guide sequence portion
  source 1..21: mol_type = other RNA
gccgacgggacgtaaacaaag

SEQ ID NO: 10039 - RNA, 21 nt, synthetic construct
  misc_feature 1..21: note = HBV-targeting guide sequence portion
  source 1..21: mol_type = other RNA
gccgatccatactgcggaact

SEQ ID NO: 10040 - RNA, 21 nt, synthetic construct
  misc_feature 1..21: note = HBV-targeting guide sequence portion
  source 1..21: mol_type = other RNA
gccgcagacacatccagcgat

SEQ ID NO: 10041 - RNA, 21 nt, synthetic construct
  misc_feature 1..21: note = HBV-targeting guide sequence portion
  source 1..21: mol_type = other RNA
gccgcagctctgtatcgggat

SEQ ID NO: 10042 - RNA, 21 nt, synthetic construct
  misc_feature 1..21: note = HBV-targeting guide sequence portion
  source 1..21: mol_type = other RNA
gccgcgtcgcagaagatctca

SEQ ID NO: 10043 - RNA, 21 nt, synthetic construct
  misc_feature 1..21: note = HBV-targeting guide sequence portion
  source 1..21: mol_type = other RNA
gccgcttggggccctgtcgtc

SEQ ID NO: 10044 - RNA, 21 nt, synthetic construct
  misc_feature 1..21: note = HBV-targeting guide sequence portion
  source 1..21: mol_type = other RNA
gccgcttgttttgctcgcagc

SEQ ID NO: 10045 - RNA, 21 nt, synthetic construct
  misc_feature 1..21: note = HBV-targeting guide sequence portion
  source 1..21: mol_type = other RNA
gccggaaaggttccacgcatg

SEQ ID NO: 10046 - RNA, 21 nt, synthetic construct
  misc_feature 1..21: note = HBV-targeting guide sequence portion
  source 1..21: mol_type = other RNA
gccggaccgtgtgcacttcgc

SEQ ID NO: 10047 - RNA, 21 nt, synthetic construct
  misc_feature 1..21: note = HBV-targeting guide sequence portion
  source 1..21: mol_type = other RNA
gccggtctggagcaaacattc

SEQ ID NO: 10048 - RNA, 21 nt, synthetic construct
  misc_feature 1..21: note = HBV-targeting guide sequence portion
  source 1..21: mol_type = other RNA
gccgtcctgactggcgattgg

SEQ ID NO: 10049 - RNA, 21 nt, synthetic construct
  misc_feature 1..21: note = HBV-targeting guide sequence portion
  source 1..21: mol_type = other RNA
gccgttccgaccgaccacggg

SEQ ID NO: 10050 - RNA, 21 nt, synthetic construct
  misc_feature 1..21: note = HBV-targeting guide sequence portion
  source 1..21: mol_type = other RNA
gccgttgcctggcaacggggt

SEQ ID NO: 10051 - RNA, 21 nt, synthetic construct
  misc_feature 1..21: note = HBV-targeting guide sequence portion
  source 1..21: mol_type = other RNA
gcctaaagttcagacaactat

SEQ ID NO: 10052 - RNA, 21 nt, synthetic construct
  misc_feature 1..21: note = HBV-targeting guide sequence portion
  source 1..21: mol_type = other RNA
gcctaatcatctcttgttcat

SEQ ID NO: 10053 - RNA, 21 nt, synthetic construct
  misc_feature 1..21: note = HBV-targeting guide sequence portion
  source 1..21: mol_type = other RNA
gcctacaaactgttcacattt

SEQ ID NO: 10054 - RNA, 21 nt, synthetic construct
  misc_feature 1..21: note = HBV-targeting guide sequence portion
  source 1..21: mol_type = other RNA
gcctacagcctcctagtacaa

SEQ ID NO: 10055 - RNA, 21 nt, synthetic construct
  misc_feature 1..21: note = HBV-targeting guide sequence portion
  source 1..21: mol_type = other RNA
gcctaccccgctgtctccacc

SEQ ID NO: 10056 - RNA, 21 nt, synthetic construct
  misc_feature 1..21: note = HBV-targeting guide sequence portion
  source 1..21: mol_type = other RNA
gcctagcagccatgggaacga

SEQ ID NO: 10057 - RNA, 21 nt, synthetic construct
  misc_feature 1..21: note = HBV-targeting guide sequence portion
  source 1..21: mol_type = other RNA
gcctatgaccaagccccaacc

SEQ ID NO: 10058 - RNA, 21 nt, synthetic construct
  misc_feature 1..21: note = HBV-targeting guide sequence portion
  source 1..21: mol_type = other RNA
gcctattgattggaaagtgtg

SEQ ID NO: 10059 - RNA, 21 nt, synthetic construct
  misc_feature 1..21: note = HBV-targeting guide sequence portion
  source 1..21: mol_type = other RNA
gcctcaaggtcggtcgttgac

SEQ ID NO: 10060 - RNA, 21 nt, synthetic construct
  misc_feature 1..21: note = HBV-targeting guide sequence portion
  source 1..21: mol_type = other RNA
gcctcagcccgtttctcttgg

SEQ ID NO: 10061 - RNA, 21 nt, synthetic construct
  misc_feature 1..21: note = HBV-targeting guide sequence portion
  source 1..21: mol_type = other RNA
gcctcatcttcttgttggttc

SEQ ID NO: 10062 - RNA, 21 nt, synthetic construct
  misc_feature 1..21: note = HBV-targeting guide sequence portion
  source 1..21: mol_type = other RNA
gcctcattctgtgggtcacca

SEQ ID NO: 10063 - RNA, 21 nt, synthetic construct
  misc_feature 1..21: note = HBV-targeting guide sequence portion
  source 1..21: mol_type = other RNA
gcctccaagctgtgccttggg

SEQ ID NO: 10064 - RNA, 21 nt, synthetic construct
  misc_feature 1..21: note = HBV-targeting guide sequence portion
  source 1..21: mol_type = other RNA
gcctccgtgcggtggggtgaa

SEQ ID NO: 10065 - RNA, 21 nt, synthetic construct
  misc_feature 1..21: note = HBV-targeting guide sequence portion
  source 1..21: mol_type = other RNA
gcctcctagtacaaagatcat

SEQ ID NO: 10066 - RNA, 21 nt, synthetic construct
  misc_feature 1..21: note = HBV-targeting guide sequence portion
  source 1..21: mol_type = other RNA
gcctcctgcctctaccaatcg

SEQ ID NO: 10067 - RNA, 21 nt, synthetic construct
  misc_feature 1..21: note = HBV-targeting guide sequence portion
  source 1..21: mol_type = other RNA
gcctcgagatgggtcgtccgc

SEQ ID NO: 10068 - RNA, 21 nt, synthetic construct
  misc_feature 1..21: note = HBV-targeting guide sequence portion
  source 1..21: mol_type = other RNA
gcctcgcagacgaagatctca

SEQ ID NO: 10069 - RNA, 21 nt, synthetic construct
  misc_feature 1..21: note = HBV-targeting guide sequence portion
  source 1..21: mol_type = other RNA
gcctcgtcgtctaacaacaca

SEQ ID NO: 10070 - RNA, 21 nt, synthetic construct
  misc_feature 1..21: note = HBV-targeting guide sequence portion
  source 1..21: mol_type = other RNA
gcctctaccaatcgccagtca

SEQ ID NO: 10071 - RNA, 21 nt, synthetic construct
  misc_feature 1..21: note = HBV-targeting guide sequence portion
  source 1..21: mol_type = other RNA
gcctctcacatatcgtcaatc

SEQ ID NO: 10072 - RNA, 21 nt, synthetic construct
  misc_feature 1..21: note = HBV-targeting guide sequence portion
  source 1..21: mol_type = other RNA
gcctctcactctgggatcttg

SEQ ID NO: 10073 - RNA, 21 nt, synthetic construct
  misc_feature 1..21: note = HBV-targeting guide sequence portion
  source 1..21: mol_type = other RNA
gcctgaggatgagtgtttctc

SEQ ID NO: 10074 - RNA, 21 nt, synthetic construct
  misc_feature 1..21: note = HBV-targeting guide sequence portion
  source 1..21: mol_type = other RNA
gcctgagggctccaccccaaa

SEQ ID NO: 10075 - RNA, 21 nt, synthetic construct
  misc_feature 1..21: note = HBV-targeting guide sequence portion
  source 1..21: mol_type = other RNA
gcctgagtgcagtatggtgag

SEQ ID NO: 10076 - RNA, 21 nt, synthetic construct
  misc_feature 1..21: note = HBV-targeting guide sequence portion
  source 1..21: mol_type = other RNA
gcctgccgttccgaccgacca

SEQ ID NO: 10077 - RNA, 21 nt, synthetic construct
  misc_feature 1..21: note = HBV-targeting guide sequence portion
  source 1..21: mol_type = other RNA
gcctgctaggttttatcctaa

SEQ ID NO: 10078 - RNA, 21 nt, synthetic construct
  misc_feature 1..21: note = HBV-targeting guide sequence portion
  source 1..21: mol_type = other RNA
gcctgcttagattgaatacat

SEQ ID NO: 10079 - RNA, 21 nt, synthetic construct
  misc_feature 1..21: note = HBV-targeting guide sequence portion
  source 1..21: mol_type = other RNA
gcctggcaacggggtaaaggt

SEQ ID NO: 10080 - RNA, 21 nt, synthetic construct
  misc_feature 1..21: note = HBV-targeting guide sequence portion
  source 1..21: mol_type = other RNA
gcctgtaacacgagcaggggt

SEQ ID NO: 10081 - RNA, 21 nt, synthetic construct
  misc_feature 1..21: note = HBV-targeting guide sequence portion
  source 1..21: mol_type = other RNA
gcctgtatctccctgctggtg

SEQ ID NO: 10082 - RNA, 21 nt, synthetic construct
  misc_feature 1..21: note = HBV-targeting guide sequence portion
  source 1..21: mol_type = other RNA
gcctgttaaccgggagttttc

SEQ ID NO: 10083 - RNA, 21 nt, synthetic construct
  misc_feature 1..21: note = HBV-targeting guide sequence portion
  source 1..21: mol_type = other RNA
gccttcagagcaaactccaac

SEQ ID NO: 10084 - RNA, 21 nt, synthetic construct
  misc_feature 1..21: note = HBV-targeting guide sequence portion
  source 1..21: mol_type = other RNA
gccttccatagagtgtgtaaa

SEQ ID NO: 10085 - RNA, 21 nt, synthetic construct
  misc_feature 1..21: note = HBV-targeting guide sequence portion
  source 1..21: mol_type = other RNA
gccttctcatctgccggaccg

SEQ ID NO: 10086 - RNA, 21 nt, synthetic construct
  misc_feature 1..21: note = HBV-targeting guide sequence portion
  source 1..21: mol_type = other RNA
gccttctgacttctttccttc

SEQ ID NO: 10087 - RNA, 21 nt, synthetic construct
  misc_feature 1..21: note = HBV-targeting guide sequence portion
  source 1..21: mol_type = other RNA
gccttggagtctcctgagcat

SEQ ID NO: 10088 - RNA, 21 nt, synthetic construct
  misc_feature 1..21: note = HBV-targeting guide sequence portion
  source 1..21: mol_type = other RNA
gccttgggtggctttagggca

SEQ ID NO: 10089 - RNA, 21 nt, synthetic construct
  misc_feature 1..21: note = HBV-targeting guide sequence portion
  source 1..21: mol_type = other RNA
gccttgtaagttggcgaaaaa

SEQ ID NO: 10090 - RNA, 21 nt, synthetic construct
  misc_feature 1..21: note = HBV-targeting guide sequence portion
  source 1..21: mol_type = other RNA
gcctttctgtgtaaacaatac

SEQ ID NO: 10091 - RNA, 21 nt, synthetic construct
  misc_feature 1..21: note = HBV-targeting guide sequence portion
  source 1..21: mol_type = other RNA
gccttttggggtggagccctc

SEQ ID NO: 10092 - RNA, 21 nt, synthetic construct
  misc_feature 1..21: note = HBV-targeting guide sequence portion
  source 1..21: mol_type = other RNA
gcgaaaaagtgaaagcctgct

SEQ ID NO: 10093 - RNA, 21 nt, synthetic construct
  misc_feature 1..21: note = HBV-targeting guide sequence portion
  source 1..21: mol_type = other RNA
gcgaagtgcacacggtccggc

SEQ ID NO: 10094 - RNA, 21 nt, synthetic construct
  misc_feature 1..21: note = HBV-targeting guide sequence portion
  source 1..21: mol_type = other RNA
gcgaatccacactccaaaaga

SEQ ID NO: 10095 - RNA, 21 nt, synthetic construct
  misc_feature 1..21: note = HBV-targeting guide sequence portion
  source 1..21: mol_type = other RNA
gcgaattttggccaagacaca

SEQ ID NO: 10096 - RNA, 21 nt, synthetic construct
  misc_feature 1..21: note = HBV-targeting guide sequence portion
  source 1..21: mol_type = other RNA
gcgacgcggcgattgagatct

SEQ ID NO: 10097 - RNA, 21 nt, synthetic construct
  misc_feature 1..21: note = HBV-targeting guide sequence portion
  source 1..21: mol_type = other RNA
gcgacgtgcagaggtgaagcg

SEQ ID NO: 10098 - RNA, 21 nt, synthetic construct
  misc_feature 1..21: note = HBV-targeting guide sequence portion
  source 1..21: mol_type = other RNA
gcgagcaaaacaagcggctag

SEQ ID NO: 10099 - RNA, 21 nt, synthetic construct
  misc_feature 1..21: note = HBV-targeting guide sequence portion
  source 1..21: mol_type = other RNA
gcgaggcgagggagttcttct

SEQ ID NO: 10100 - RNA, 21 nt, synthetic construct
  misc_feature 1..21: note = HBV-targeting guide sequence portion
  source 1..21: mol_type = other RNA
gcgagggagttcttcttctag

SEQ ID NO: 10101 - RNA, 21 nt, synthetic construct
  misc_feature 1..21: note = HBV-targeting guide sequence portion
  source 1..21: mol_type = other RNA
gcgataaccaggacaagttgg

SEQ ID NO: 10102 - RNA, 21 nt, synthetic construct
  misc_feature 1..21: note = HBV-targeting guide sequence portion
  source 1..21: mol_type = other RNA
gcgattgagatcttcgtctgc

SEQ ID NO: 10103 - RNA, 21 nt, synthetic construct
  misc_feature 1..21: note = HBV-targeting guide sequence portion
  source 1..21: mol_type = other RNA
gcgattggtagaggcaggagg

SEQ ID NO: 10104 - RNA, 21 nt, synthetic construct
  misc_feature 1..21: note = HBV-targeting guide sequence portion
  source 1..21: mol_type = other RNA
gcgcaccagcaccatgcaact

SEQ ID NO: 10105 - RNA, 21 nt, synthetic construct
  misc_feature 1..21: note = HBV-targeting guide sequence portion
  source 1..21: mol_type = other RNA
gcgcacctctctttacgcgga

SEQ ID NO: 10106 - RNA, 21 nt, synthetic construct
  misc_feature 1..21: note = HBV-targeting guide sequence portion
  source 1..21: mol_type = other RNA
gcgcagaccaatttatgccta

SEQ ID NO: 10107 - RNA, 21 nt, synthetic construct
  misc_feature 1..21: note = HBV-targeting guide sequence portion
  source 1..21: mol_type = other RNA
gcgcaggatccagttggcagc

SEQ ID NO: 10108 - RNA, 21 nt, synthetic construct
  misc_feature 1..21: note = HBV-targeting guide sequence portion
  source 1..21: mol_type = other RNA
gcgcagggtccccaatcctcg

SEQ ID NO: 10109 - RNA, 21 nt, synthetic construct
  misc_feature 1..21: note = HBV-targeting guide sequence portion
  source 1..21: mol_type = other RNA
gcgcatgcgtggaacctttcc

SEQ ID NO: 10110 - RNA, 21 nt, synthetic construct
  misc_feature 1..21: note = HBV-targeting guide sequence portion
  source 1..21: mol_type = other RNA
gcgccccgtggtcggtcggaa

SEQ ID NO: 10111 - RNA, 21 nt, synthetic construct
  misc_feature 1..21: note = HBV-targeting guide sequence portion
  source 1..21: mol_type = other RNA
gcgccgacgggacgtaaacaa

SEQ ID NO: 10112 - RNA, 21 nt, synthetic construct
  misc_feature 1..21: note = HBV-targeting guide sequence portion
  source 1..21: mol_type = other RNA
gcgcctcattctgtgggtcac

SEQ ID NO: 10113 - RNA, 21 nt, synthetic construct
  misc_feature 1..21: note = HBV-targeting guide sequence portion
  source 1..21: mol_type = other RNA
gcgcgggacgtcctttgttta

SEQ ID NO: 10114 - RNA, 21 nt, synthetic construct
  misc_feature 1..21: note = HBV-targeting guide sequence portion
  source 1..21: mol_type = other RNA
gcgctatgtgttgacactctc

SEQ ID NO: 10115 - RNA, 21 nt, synthetic construct
  misc_feature 1..21: note = HBV-targeting guide sequence portion
  source 1..21: mol_type = other RNA
gcgctgaacatggagaacatc

SEQ ID NO: 10116 - RNA, 21 nt, synthetic construct
  misc_feature 1..21: note = HBV-targeting guide sequence portion
  source 1..21: mol_type = other RNA
gcgctgaatcccgcggacgac

SEQ ID NO: 10117 - RNA, 21 nt, synthetic construct
  misc_feature 1..21: note = HBV-targeting guide sequence portion
  source 1..21: mol_type = other RNA
gcgctgatggcctatgaccaa

SEQ ID NO: 10118 - RNA, 21 nt, synthetic construct
  misc_feature 1..21: note = HBV-targeting guide sequence portion
  source 1..21: mol_type = other RNA
gcggaactcctagccgcttgt

SEQ ID NO: 10119 - RNA, 21 nt, synthetic construct
  misc_feature 1..21: note = HBV-targeting guide sequence portion
  source 1..21: mol_type = other RNA
gcggacgacccatctcgaggc

SEQ ID NO: 10120 - RNA, 21 nt, synthetic construct
  misc_feature 1..21: note = HBV-targeting guide sequence portion
  source 1..21: mol_type = other RNA
gcggactccccgtctgtgcct

SEQ ID NO: 10121 - RNA, 21 nt, synthetic construct
  misc_feature 1..21: note = HBV-targeting guide sequence portion
  source 1..21: mol_type = other RNA
gcggatttgctggcaaggttt

SEQ ID NO: 10122 - RNA, 21 nt, synthetic construct
  misc_feature 1..21: note = HBV-targeting guide sequence portion
  source 1..21: mol_type = other RNA
gcggcctcgagatgggtcgtc

SEQ ID NO: 10123 - RNA, 21 nt, synthetic construct
  misc_feature 1..21: note = HBV-targeting guide sequence portion
  source 1..21: mol_type = other RNA
gcggcgattgagatcttcgtc

SEQ ID NO: 10124 - RNA, 21 nt, synthetic construct
  misc_feature 1..21: note = HBV-targeting guide sequence portion
  source 1..21: mol_type = other RNA
gcggcggtatctagaagatct

SEQ ID NO: 10125 - RNA, 21 nt, synthetic construct
  misc_feature 1..21: note = HBV-targeting guide sequence portion
  source 1..21: mol_type = other RNA
gcggcgttttatcatcttcct

SEQ ID NO: 10126 - RNA, 21 nt, synthetic construct
  misc_feature 1..21: note = HBV-targeting guide sequence portion
  source 1..21: mol_type = other RNA
gcggctaggagttccgcagta

SEQ ID NO: 10127 - RNA, 21 nt, synthetic construct
  misc_feature 1..21: note = HBV-targeting guide sequence portion
  source 1..21: mol_type = other RNA
gcgggacgtcctttgtttacg

SEQ ID NO: 10128 - RNA, 21 nt, synthetic construct
  misc_feature 1..21: note = HBV-targeting guide sequence portion
  source 1..21: mol_type = other RNA
gcgggagaggacaacagagtt

SEQ ID NO: 10129 - RNA, 21 nt, synthetic construct
  misc_feature 1..21: note = HBV-targeting guide sequence portion
  source 1..21: mol_type = other RNA
gcgggattcagcgccgacggg

SEQ ID NO: 10130 - RNA, 21 nt, synthetic construct
  misc_feature 1..21: note = HBV-targeting guide sequence portion
  source 1..21: mol_type = other RNA
gcgggcctacaaactgttcac

SEQ ID NO: 10131 - RNA, 21 nt, synthetic construct
  misc_feature 1..21: note = HBV-targeting guide sequence portion
  source 1..21: mol_type = other RNA
gcggggtaggctgccgtcctg

SEQ ID NO: 10132 - RNA, 21 nt, synthetic construct
  misc_feature 1..21: note = HBV-targeting guide sequence portion
  source 1..21: mol_type = other RNA
gcggggttttccttgttgaca

SEQ ID NO: 10133 - RNA, 21 nt, synthetic construct
  misc_feature 1..21: note = HBV-targeting guide sequence portion
  source 1..21: mol_type = other RNA
gcgggtgttttatataagaga

SEQ ID NO: 10134 - RNA, 21 nt, synthetic construct
  misc_feature 1..21: note = HBV-targeting guide sequence portion
  source 1..21: mol_type = other RNA
gcggtataaagggactcaaga

SEQ ID NO: 10135 - RNA, 21 nt, synthetic construct
  misc_feature 1..21: note = HBV-targeting guide sequence portion
  source 1..21: mol_type = other RNA
gcggtatctagaagatctcgt

SEQ ID NO: 10136 - RNA, 21 nt, synthetic construct
  misc_feature 1..21: note = HBV-targeting guide sequence portion
  source 1..21: mol_type = other RNA
gcggtattgtgaggattcttg

SEQ ID NO: 10137 - RNA, 21 nt, synthetic construct
  misc_feature 1..21: note = HBV-targeting guide sequence portion
  source 1..21: mol_type = other RNA
gcggtggggtgaaccctagcc

SEQ ID NO: 10138 - RNA, 21 nt, synthetic construct
  misc_feature 1..21: note = HBV-targeting guide sequence portion
  source 1..21: mol_type = other RNA
gcgtaaagagaggtgcgcccc

SEQ ID NO: 10139 - RNA, 21 nt, synthetic construct
  misc_feature 1..21: note = HBV-targeting guide sequence portion
  source 1..21: mol_type = other RNA
gcgtcgcagaagatctcaatc

SEQ ID NO: 10140 - RNA, 21 nt, synthetic construct
  misc_feature 1..21: note = HBV-targeting guide sequence portion
  source 1..21: mol_type = other RNA
gcgtctggccagggatccttg

SEQ ID NO: 10141 - RNA, 21 nt, synthetic construct
  misc_feature 1..21: note = HBV-targeting guide sequence portion
  source 1..21: mol_type = other RNA
gcgtggaacctttccggctcc

SEQ ID NO: 10142 - RNA, 21 nt, synthetic construct
  misc_feature 1..21: note = HBV-targeting guide sequence portion
  source 1..21: mol_type = other RNA
gcgttcacggtggtctccatg

SEQ ID NO: 10143 - RNA, 21 nt, synthetic construct
  misc_feature 1..21: note = HBV-targeting guide sequence portion
  source 1..21: mol_type = other RNA
gcgttttatcatcttcctctt

SEQ ID NO: 10144 - RNA, 21 nt, synthetic construct
  misc_feature 1..21: note = HBV-targeting guide sequence portion
  source 1..21: mol_type = other RNA
gctacagcatggggcagaatc

SEQ ID NO: 10145 - RNA, 21 nt, synthetic construct
  misc_feature 1..21: note = HBV-targeting guide sequence portion
  source 1..21: mol_type = other RNA
gctacctgggtgggtactaat

SEQ ID NO: 10146 - RNA, 21 nt, synthetic construct
  misc_feature 1..21: note = HBV-targeting guide sequence portion
  source 1..21: mol_type = other RNA
gctactgtggagttactctcg

SEQ ID NO: 10147 - RNA, 21 nt, synthetic construct
  misc_feature 1..21: note = HBV-targeting guide sequence portion
  source 1..21: mol_type = other RNA
gctagagtcattagttctccc

SEQ ID NO: 10148 - RNA, 21 nt, synthetic construct
  misc_feature 1..21: note = HBV-targeting guide sequence portion
  source 1..21: mol_type = other RNA
gctaggagttccgcagtatgg

SEQ ID NO: 10149 - RNA, 21 nt, synthetic construct
  misc_feature 1..21: note = HBV-targeting guide sequence portion
  source 1..21: mol_type = other RNA
gctaggctgtgctgccaactg

SEQ ID NO: 10150 - RNA, 21 nt, synthetic construct
  misc_feature 1..21: note = HBV-targeting guide sequence portion
  source 1..21: mol_type = other RNA
gctagggttcaccccaccgca

SEQ ID NO: 10151 - RNA, 21 nt, synthetic construct
  misc_feature 1..21: note = HBV-targeting guide sequence portion
  source 1..21: mol_type = other RNA
gctaggttttatcctaaattc

SEQ ID NO: 10152 - RNA, 21 nt, synthetic construct
  misc_feature 1..21: note = HBV-targeting guide sequence portion
  source 1..21: mol_type = other RNA
gctatgcctcatcttcttgtt

SEQ ID NO: 10153 - RNA, 21 nt, synthetic construct
  misc_feature 1..21: note = HBV-targeting guide sequence portion
  source 1..21: mol_type = other RNA
gctatgtcattgattgttggg

SEQ ID NO: 10154 - RNA, 21 nt, synthetic construct
  misc_feature 1..21: note = HBV-targeting guide sequence portion
  source 1..21: mol_type = other RNA
gctatgtgttgacactctctt

SEQ ID NO: 10155 - RNA, 21 nt, synthetic construct
  misc_feature 1..21: note = HBV-targeting guide sequence portion
  source 1..21: mol_type = other RNA
gctcaaggaacctctatgtat

SEQ ID NO: 10156 - RNA, 21 nt, synthetic construct
  misc_feature 1..21: note = HBV-targeting guide sequence portion
  source 1..21: mol_type = other RNA
gctcaggagactccaaggcat

SEQ ID NO: 10157 - RNA, 21 nt, synthetic construct
  misc_feature 1..21: note = HBV-targeting guide sequence portion
  source 1..21: mol_type = other RNA
gctcagggcataatgcaaacc

SEQ ID NO: 10158 - RNA, 21 nt, synthetic construct
  misc_feature 1..21: note = HBV-targeting guide sequence portion
  source 1..21: mol_type = other RNA
gctcagtttactagtgccatt

SEQ ID NO: 10159 - RNA, 21 nt, synthetic construct
  misc_feature 1..21: note = HBV-targeting guide sequence portion
  source 1..21: mol_type = other RNA
gctccaaattctttatatggg

SEQ ID NO: 10160 - RNA, 21 nt, synthetic construct
  misc_feature 1..21: note = HBV-targeting guide sequence portion
  source 1..21: mol_type = other RNA
gctccaccccaaaaggcctcc

SEQ ID NO: 10161 - RNA, 21 nt, synthetic construct
  misc_feature 1..21: note = HBV-targeting guide sequence portion
  source 1..21: mol_type = other RNA
gctccagaccggctgcgagca

SEQ ID NO: 10162 - RNA, 21 nt, synthetic construct
  misc_feature 1..21: note = HBV-targeting guide sequence portion
  source 1..21: mol_type = other RNA
gctccagctcctaccttgttg

SEQ ID NO: 10163 - RNA, 21 nt, synthetic construct
  misc_feature 1..21: note = HBV-targeting guide sequence portion
  source 1..21: mol_type = other RNA
gctccagttcaggaacagtaa

SEQ ID NO: 10164 - RNA, 21 nt, synthetic construct
  misc_feature 1..21: note = HBV-targeting guide sequence portion
  source 1..21: mol_type = other RNA
gctcctaccttgttggcgtct

SEQ ID NO: 10165 - RNA, 21 nt, synthetic construct
  misc_feature 1..21: note = HBV-targeting guide sequence portion
  source 1..21: mol_type = other RNA
gctcctctgccgatccatact

SEQ ID NO: 10166 - RNA, 21 nt, synthetic construct
  misc_feature 1..21: note = HBV-targeting guide sequence portion
  source 1..21: mol_type = other RNA
gctcgcagccggtctggagca

SEQ ID NO: 10167 - RNA, 21 nt, synthetic construct
  misc_feature 1..21: note = HBV-targeting guide sequence portion
  source 1..21: mol_type = other RNA
gctcgtgttacaggcggggtt

SEQ ID NO: 10168 - RNA, 21 nt, synthetic construct
  misc_feature 1..21: note = HBV-targeting guide sequence portion
  source 1..21: mol_type = other RNA
gctctgaaggctgggtccaac

SEQ ID NO: 10169 - RNA, 21 nt, synthetic construct
  misc_feature 1..21: note = HBV-targeting guide sequence portion
  source 1..21: mol_type = other RNA
gctctgtatcgggatgccttg

SEQ ID NO: 10170 - RNA, 21 nt, synthetic construct
  misc_feature 1..21: note = HBV-targeting guide sequence portion
  source 1..21: mol_type = other RNA
gctcttgttcccaagaatatg

SEQ ID NO: 10171 - RNA, 21 nt, synthetic construct
  misc_feature 1..21: note = HBV-targeting guide sequence portion
  source 1..21: mol_type = other RNA
gctgaacatggagaacatcac

SEQ ID NO: 10172 - RNA, 21 nt, synthetic construct
  misc_feature 1..21: note = HBV-targeting guide sequence portion
  source 1..21: mol_type = other RNA
gctgaatcccgcggacgaccc

SEQ ID NO: 10173 - RNA, 21 nt, synthetic construct
  misc_feature 1..21: note = HBV-targeting guide sequence portion
  source 1..21: mol_type = other RNA
gctgaggcccactcccatagg

SEQ ID NO: 10174 - RNA, 21 nt, synthetic construct
  misc_feature 1..21: note = HBV-targeting guide sequence portion
  source 1..21: mol_type = other RNA
gctgatgcaacccccactggt

SEQ ID NO: 10175 - RNA, 21 nt, synthetic construct
  misc_feature 1..21: note = HBV-targeting guide sequence portion
  source 1..21: mol_type = other RNA
gctgatggcctatgaccaagc

SEQ ID NO: 10176 - RNA, 21 nt, synthetic construct
  misc_feature 1..21: note = HBV-targeting guide sequence portion
  source 1..21: mol_type = other RNA
gctgccaactggatcctgcgc

SEQ ID NO: 10177 - RNA, 21 nt, synthetic construct
  misc_feature 1..21: note = HBV-targeting guide sequence portion
  source 1..21: mol_type = other RNA
gctgccccttttacacaatgt

SEQ ID NO: 10178 - RNA, 21 nt, synthetic construct
  misc_feature 1..21: note = HBV-targeting guide sequence portion
  source 1..21: mol_type = other RNA
gctgccgtcctgactggcgat

SEQ ID NO: 10179 - RNA, 21 nt, synthetic construct
  misc_feature 1..21: note = HBV-targeting guide sequence portion
  source 1..21: mol_type = other RNA
gctgcgagcaaaacaagcggc

SEQ ID NO: 10180 - RNA, 21 nt, synthetic construct
  misc_feature 1..21: note = HBV-targeting guide sequence portion
  source 1..21: mol_type = other RNA
gctgcggcggtatctagaaga

SEQ ID NO: 10181 - RNA, 21 nt, synthetic construct
  misc_feature 1..21: note = HBV-targeting guide sequence portion
  source 1..21: mol_type = other RNA
gctgctaggctgtgctgccaa

SEQ ID NO: 10182 - RNA, 21 nt, synthetic construct
  misc_feature 1..21: note = HBV-targeting guide sequence portion
  source 1..21: mol_type = other RNA
gctgctatgcctcatcttctt

SEQ ID NO: 10183 - RNA, 21 nt, synthetic construct
  misc_feature 1..21: note = HBV-targeting guide sequence portion
  source 1..21: mol_type = other RNA
gctggagcattcgggctaggg

SEQ ID NO: 10184 - RNA, 21 nt, synthetic construct
  misc_feature 1..21: note = HBV-targeting guide sequence portion
  source 1..21: mol_type = other RNA
gctggaggagtgcgaatccac

SEQ ID NO: 10185 - RNA, 21 nt, synthetic construct
  misc_feature 1..21: note = HBV-targeting guide sequence portion
  source 1..21: mol_type = other RNA
gctggatgtgtctgcggcgtt

SEQ ID NO: 10186 - RNA, 21 nt, synthetic construct
  misc_feature 1..21: note = HBV-targeting guide sequence portion
  source 1..21: mol_type = other RNA
gctggcaaggtttgcattatg

SEQ ID NO: 10187 - RNA, 21 nt, synthetic construct
  misc_feature 1..21: note = HBV-targeting guide sequence portion
  source 1..21: mol_type = other RNA
gctggggagaactaatgactc

SEQ ID NO: 10188 - RNA, 21 nt, synthetic construct
  misc_feature 1..21: note = HBV-targeting guide sequence portion
  source 1..21: mol_type = other RNA
gctgggtccaactggtggtcg

SEQ ID NO: 10189 - RNA, 21 nt, synthetic construct
  misc_feature 1..21: note = HBV-targeting guide sequence portion
  source 1..21: mol_type = other RNA
gctggtgcgcagaccaattta

SEQ ID NO: 10190 - RNA, 21 nt, synthetic construct
  misc_feature 1..21: note = HBV-targeting guide sequence portion
  source 1..21: mol_type = other RNA
gctggtggaaagattctgccc

SEQ ID NO: 10191 - RNA, 21 nt, synthetic construct
  misc_feature 1..21: note = HBV-targeting guide sequence portion
  source 1..21: mol_type = other RNA
gctggtggctccagttcagga

SEQ ID NO: 10192 - RNA, 21 nt, synthetic construct
  misc_feature 1..21: note = HBV-targeting guide sequence portion
  source 1..21: mol_type = other RNA
gctggtggttgatgatcctgg

SEQ ID NO: 10193 - RNA, 21 nt, synthetic construct
  misc_feature 1..21: note = HBV-targeting guide sequence portion
  source 1..21: mol_type = other RNA
gctgtacaaaaccttcggatg

SEQ ID NO: 10194 - RNA, 21 nt, synthetic construct
  misc_feature 1..21: note = HBV-targeting guide sequence portion
  source 1..21: mol_type = other RNA
gctgtacagacttggccccca

SEQ ID NO: 10195 - RNA, 21 nt, synthetic construct
  misc_feature 1..21: note = HBV-targeting guide sequence portion
  source 1..21: mol_type = other RNA
gctgtagctcttgttcccaag

SEQ ID NO: 10196 - RNA, 21 nt, synthetic construct
  misc_feature 1..21: note = HBV-targeting guide sequence portion
  source 1..21: mol_type = other RNA
gctgtaggcataaattggtct

SEQ ID NO: 10197 - RNA, 21 nt, synthetic construct
  misc_feature 1..21: note = HBV-targeting guide sequence portion
  source 1..21: mol_type = other RNA
gctgtctccacctctgagaaa

SEQ ID NO: 10198 - RNA, 21 nt, synthetic construct
  misc_feature 1..21: note = HBV-targeting guide sequence portion
  source 1..21: mol_type = other RNA
gctgtgccttgggtggcttta

SEQ ID NO: 10199 - RNA, 21 nt, synthetic construct
  misc_feature 1..21: note = HBV-targeting guide sequence portion
  source 1..21: mol_type = other RNA
gctgtgctgccaactggatcc

SEQ ID NO: 10200 - RNA, 21 nt, synthetic construct
  misc_feature 1..21: note = HBV-targeting guide sequence portion
  source 1..21: mol_type = other RNA
gctgttaccaattttcttttg

SEQ ID NO: 10201 - RNA, 21 nt, synthetic construct
  misc_feature 1..21: note = HBV-targeting guide sequence portion
  source 1..21: mol_type = other RNA
gcttacagttaatgagaaaag

SEQ ID NO: 10202 - RNA, 21 nt, synthetic construct
  misc_feature 1..21: note = HBV-targeting guide sequence portion
  source 1..21: mol_type = other RNA
gcttagattgaatacatgcat

SEQ ID NO: 10203 - RNA, 21 nt, synthetic construct
  misc_feature 1..21: note = HBV-targeting guide sequence portion
  source 1..21: mol_type = other RNA
gcttatagaccaccaaatgcc

SEQ ID NO: 10204 - RNA, 21 nt, synthetic construct
  misc_feature 1..21: note = HBV-targeting guide sequence portion
  source 1..21: mol_type = other RNA
gcttcacctctgcacgtcgca

SEQ ID NO: 10205 - RNA, 21 nt, synthetic construct
  misc_feature 1..21: note = HBV-targeting guide sequence portion
  source 1..21: mol_type = other RNA
gcttgaacagtaggacatgaa

SEQ ID NO: 10206 - RNA, 21 nt, synthetic construct
  misc_feature 1..21: note = HBV-targeting guide sequence portion
  source 1..21: mol_type = other RNA
gcttgatcttctaaattagta

SEQ ID NO: 10207 - RNA, 21 nt, synthetic construct
  misc_feature 1..21: note = HBV-targeting guide sequence portion
  source 1..21: mol_type = other RNA
gcttgcctgagtgcagtatgg

SEQ ID NO: 10208 - RNA, 21 nt, synthetic construct
  misc_feature 1..21: note = HBV-targeting guide sequence portion
  source 1..21: mol_type = other RNA
gcttggaggcttgaacagtag

SEQ ID NO: 10209 - RNA, 21 nt, synthetic construct
  misc_feature 1..21: note = HBV-targeting guide sequence portion
  source 1..21: mol_type = other RNA
gcttggggccctgtcgtcctc

SEQ ID NO: 10210 - RNA, 21 nt, synthetic construct
  misc_feature 1..21: note = HBV-targeting guide sequence portion
  source 1..21: mol_type = other RNA
gcttggtcataggccatcagc

SEQ ID NO: 10211 - RNA, 21 nt, synthetic construct
  misc_feature 1..21: note = HBV-targeting guide sequence portion
  source 1..21: mol_type = other RNA
gcttgttttgctcgcagccgg

SEQ ID NO: 10212 - RNA, 21 nt, synthetic construct
  misc_feature 1..21: note = HBV-targeting guide sequence portion
  source 1..21: mol_type = other RNA
gctttaatgcccttgtatgca

SEQ ID NO: 10213 - RNA, 21 nt, synthetic construct
  misc_feature 1..21: note = HBV-targeting guide sequence portion
  source 1..21: mol_type = other RNA
gctttagggcatggacattga

SEQ ID NO: 10214 - RNA, 21 nt, synthetic construct
  misc_feature 1..21: note = HBV-targeting guide sequence portion
  source 1..21: mol_type = other RNA
gctttattcttctactgtacc

SEQ ID NO: 10215 - RNA, 21 nt, synthetic construct
  misc_feature 1..21: note = HBV-targeting guide sequence portion
  source 1..21: mol_type = other RNA
gctttcactttttcgccaact

SEQ ID NO: 10216 - RNA, 21 nt, synthetic construct
  misc_feature 1..21: note = HBV-targeting guide sequence portion
  source 1..21: mol_type = other RNA
gctttcagttatatggatgat

SEQ ID NO: 10217 - RNA, 21 nt, synthetic construct
  misc_feature 1..21: note = HBV-targeting guide sequence portion
  source 1..21: mol_type = other RNA
gctttcccccactgtttggct

SEQ ID NO: 10218 - RNA, 21 nt, synthetic construct
  misc_feature 1..21: note = HBV-targeting guide sequence portion
  source 1..21: mol_type = other RNA
gctttcggaaaattcctatgg

SEQ ID NO: 10219 - RNA, 21 nt, synthetic construct
  misc_feature 1..21: note = HBV-targeting guide sequence portion
  source 1..21: mol_type = other RNA
ggaaaacaccctcttttccta

SEQ ID NO: 10220 - RNA, 21 nt, synthetic construct
  misc_feature 1..21: note = HBV-targeting guide sequence portion
  source 1..21: mol_type = other RNA
ggaaaaccccgcctgtaacac

SEQ ID NO: 10221 - RNA, 21 nt, synthetic construct
  misc_feature 1..21: note = HBV-targeting guide sequence portion
  source 1..21: mol_type = other RNA
ggaaaagagggtgttttccaa

SEQ ID NO: 10222 - RNA, 21 nt, synthetic construct
  misc_feature 1..21: note = HBV-targeting guide sequence portion
  source 1..21: mol_type = other RNA
ggaaaattcctatgggagtgg

SEQ ID NO: 10223 - RNA, 21 nt, synthetic construct
  misc_feature 1..21: note = HBV-targeting guide sequence portion
  source 1..21: mol_type = other RNA
ggaaacataccttgatagtcc

SEQ ID NO: 10224 - RNA, 21 nt, synthetic construct
  misc_feature 1..21: note = HBV-targeting guide sequence portion
  source 1..21: mol_type = other RNA
ggaaactgcacctgtattccc

SEQ ID NO: 10225 - RNA, 21 nt, synthetic construct
  misc_feature 1..21: note = HBV-targeting guide sequence portion
  source 1..21: mol_type = other RNA
ggaaagaagtcagaaggcaaa

SEQ ID NO: 10226 - RNA, 21 nt, synthetic construct
  misc_feature 1..21: note = HBV-targeting guide sequence portion
  source 1..21: mol_type = other RNA
ggaaagaatcccagaggattg

SEQ ID NO: 10227 - RNA, 21 nt, synthetic construct
  misc_feature 1..21: note = HBV-targeting guide sequence portion
  source 1..21: mol_type = other RNA
ggaaagattctgccccatgct

SEQ ID NO: 10228 - RNA, 21 nt, synthetic construct
  misc_feature 1..21: note = HBV-targeting guide sequence portion
  source 1..21: mol_type = other RNA
ggaaagccctacgaaccactg

SEQ ID NO: 10229 - RNA, 21 nt, synthetic construct
  misc_feature 1..21: note = HBV-targeting guide sequence portion
  source 1..21: mol_type = other RNA
ggaaaggttccacgcatgcgc

SEQ ID NO: 10230 - RNA, 21 nt, synthetic construct
  misc_feature 1..21: note = HBV-targeting guide sequence portion
  source 1..21: mol_type = other RNA
ggaaagtgtgtcaacgaattg

SEQ ID NO: 10231 - RNA, 21 nt, synthetic construct
  misc_feature 1..21: note = HBV-targeting guide sequence portion
  source 1..21: mol_type = other RNA
ggaaattttacggggctttat

SEQ ID NO: 10232 - RNA, 21 nt, synthetic construct
  misc_feature 1..21: note = HBV-targeting guide sequence portion
  source 1..21: mol_type = other RNA
ggaacaagagctacagcatgg

SEQ ID NO: 10233 - RNA, 21 nt, synthetic construct
  misc_feature 1..21: note = HBV-targeting guide sequence portion
  source 1..21: mol_type = other RNA
ggaacagggtttactgttcct

SEQ ID NO: 10234 - RNA, 21 nt, synthetic construct
  misc_feature 1..21: note = HBV-targeting guide sequence portion
  source 1..21: mol_type = other RNA
ggaacagtaaaccctgttccg

SEQ ID NO: 10235 - RNA, 21 nt, synthetic construct
  misc_feature 1..21: note = HBV-targeting guide sequence portion
  source 1..21: mol_type = other RNA
ggaacctctatgtatccctcc

SEQ ID NO: 10236 - RNA, 21 nt, synthetic construct
  misc_feature 1..21: note = HBV-targeting guide sequence portion
  source 1..21: mol_type = other RNA
ggaacctttccggctcctctg

SEQ ID NO: 10237 - RNA, 21 nt, synthetic construct
  misc_feature 1..21: note = HBV-targeting guide sequence portion
  source 1..21: mol_type = other RNA
ggaacgatgtatatttgcggg

SEQ ID NO: 10238 - RNA, 21 nt, synthetic construct
  misc_feature 1..21: note = HBV-targeting guide sequence portion
  source 1..21: mol_type = other RNA
ggaacggcaggcagagaagag

SEQ ID NO: 10239 - RNA, 21 nt, synthetic construct
  misc_feature 1..21: note = HBV-targeting guide sequence portion
  source 1..21: mol_type = other RNA
ggaactaccgtgtgtcttggc

SEQ ID NO: 10240 - RNA, 21 nt, synthetic construct
  misc_feature 1..21: note = HBV-targeting guide sequence portion
  source 1..21: mol_type = other RNA
ggaactcctagccgcttgttt

SEQ ID NO: 10241 - RNA, 21 nt, synthetic construct
  misc_feature 1..21: note = HBV-targeting guide sequence portion
  source 1..21: mol_type = other RNA
ggaagagaaacggtcctagag

SEQ ID NO: 10242 - RNA, 21 nt, synthetic construct
  misc_feature 1..21: note = HBV-targeting guide sequence portion
  source 1..21: mol_type = other RNA
ggaagatgataaaacgccgca

SEQ ID NO: 10243 - RNA, 21 nt, synthetic construct
  misc_feature 1..21: note = HBV-targeting guide sequence portion
  source 1..21: mol_type = other RNA
ggaaggaaagaagtcagaagg

SEQ ID NO: 10244 - RNA, 21 nt, synthetic construct
  misc_feature 1..21: note = HBV-targeting guide sequence portion
  source 1..21: mol_type = other RNA
ggaaggcgggtgttttatata

SEQ ID NO: 10245 - RNA, 21 nt, synthetic construct
  misc_feature 1..21: note = HBV-targeting guide sequence portion
  source 1..21: mol_type = other RNA
ggaagtaatgattaactagat

SEQ ID NO: 10246 - RNA, 21 nt, synthetic construct
  misc_feature 1..21: note = HBV-targeting guide sequence portion
  source 1..21: mol_type = other RNA
ggaagtgttgataggataggg

SEQ ID NO: 10247 - RNA, 21 nt, synthetic construct
  misc_feature 1..21: note = HBV-targeting guide sequence portion
  source 1..21: mol_type = other RNA
ggaatacaggtgcagtttcca

SEQ ID NO: 10248 - RNA, 21 nt, synthetic construct
  misc_feature 1..21: note = HBV-targeting guide sequence portion
  source 1..21: mol_type = other RNA
ggaatcctgatgtgatgttct

SEQ ID NO: 10249 - RNA, 21 nt, synthetic construct
  misc_feature 1..21: note = HBV-targeting guide sequence portion
  source 1..21: mol_type = other RNA
ggaattagaggacagacggga

SEQ ID NO: 10250 - RNA, 21 nt, synthetic construct
  misc_feature 1..21: note = HBV-targeting guide sequence portion
  source 1..21: mol_type = other RNA
ggaattttccgaaagcccagg

SEQ ID NO: 10251 - RNA, 21 nt, synthetic construct
  misc_feature 1..21: note = HBV-targeting guide sequence portion
  source 1..21: mol_type = other RNA
ggacaacagagttgtcagtcc

SEQ ID NO: 10252 - RNA, 21 nt, synthetic construct
  misc_feature 1..21: note = HBV-targeting guide sequence portion
  source 1..21: mol_type = other RNA
ggacaagttggaggacaggag

SEQ ID NO: 10253 - RNA, 21 nt, synthetic construct
  misc_feature 1..21: note = HBV-targeting guide sequence portion
  source 1..21: mol_type = other RNA
ggacagacgggaaacatacct

SEQ ID NO: 10254 - RNA, 21 nt, synthetic construct
  misc_feature 1..21: note = HBV-targeting guide sequence portion
  source 1..21: mol_type = other RNA
ggacaggaggttggtgagtga

SEQ ID NO: 10255 - RNA, 21 nt, synthetic construct
  misc_feature 1..21: note = HBV-targeting guide sequence portion
  source 1..21: mol_type = other RNA
ggacatgaacaagagatgatt

SEQ ID NO: 10256 - RNA, 21 nt, synthetic construct
  misc_feature 1..21: note = HBV-targeting guide sequence portion
  source 1..21: mol_type = other RNA
ggacattgacccatataaaga

SEQ ID NO: 10257 - RNA, 21 nt, synthetic construct
  misc_feature 1..21: note = HBV-targeting guide sequence portion
  source 1..21: mol_type = other RNA
ggacccagccttcagagcaaa

SEQ ID NO: 10258 - RNA, 21 nt, synthetic construct
  misc_feature 1..21: note = HBV-targeting guide sequence portion
  source 1..21: mol_type = other RNA
ggacccctgctcgtgttacag

SEQ ID NO: 10259 - RNA, 21 nt, synthetic construct
  misc_feature 1..21: note = HBV-targeting guide sequence portion
  source 1..21: mol_type = other RNA
ggaccctgcagaacctgcacg

SEQ ID NO: 10260 - RNA, 21 nt, synthetic construct
  misc_feature 1..21: note = HBV-targeting guide sequence portion
  source 1..21: mol_type = other RNA
ggaccctgcgctgaacatgga

SEQ ID NO: 10261 - RNA, 21 nt, synthetic construct
  misc_feature 1..21: note = HBV-targeting guide sequence portion
  source 1..21: mol_type = other RNA
ggaccgtgtgcacttcgcttc

SEQ ID NO: 10262 - RNA, 21 nt, synthetic construct
  misc_feature 1..21: note = HBV-targeting guide sequence portion
  source 1..21: mol_type = other RNA
ggaccgtttctcttccaaaag

SEQ ID NO: 10263 - RNA, 21 nt, synthetic construct
  misc_feature 1..21: note = HBV-targeting guide sequence portion
  source 1..21: mol_type = other RNA
ggacctagtagtcagttatgt

SEQ ID NO: 10264 - RNA, 21 nt, synthetic construct
  misc_feature 1..21: note = HBV-targeting guide sequence portion
  source 1..21: mol_type = other RNA
ggacctgcctcgtcgtctaac

SEQ ID NO: 10265 - RNA, 21 nt, synthetic construct
  misc_feature 1..21: note = HBV-targeting guide sequence portion
  source 1..21: mol_type = other RNA
ggacgacagggccccaagcgg

SEQ ID NO: 10266 - RNA, 21 nt, synthetic construct
  misc_feature 1..21: note = HBV-targeting guide sequence portion
  source 1..21: mol_type = other RNA
ggacgacccatctcgaggccg

SEQ ID NO: 10267 - RNA, 21 nt, synthetic construct
  misc_feature 1..21: note = HBV-targeting guide sequence portion
  source 1..21: mol_type = other RNA
ggacggcagcctaccccgctg

SEQ ID NO: 10268 - RNA, 21 nt, synthetic construct
  misc_feature 1..21: note = HBV-targeting guide sequence portion
  source 1..21: mol_type = other RNA
ggacgtaaacaaaggacgtcc

SEQ ID NO: 10269 - RNA, 21 nt, synthetic construct
  misc_feature 1..21: note = HBV-targeting guide sequence portion
  source 1..21: mol_type = other RNA
ggacgtcccgcgcaggatcca

SEQ ID NO: 10270 - RNA, 21 nt, synthetic construct
  misc_feature 1..21: note = HBV-targeting guide sequence portion
  source 1..21: mol_type = other RNA
ggacgtcctttgtttacgtcc

SEQ ID NO: 10271 - RNA, 21 nt, synthetic construct
  misc_feature 1..21: note = HBV-targeting guide sequence portion
  source 1..21: mol_type = other RNA
ggactatcaaggtatgtttcc

SEQ ID NO: 10272 - RNA, 21 nt, synthetic construct
  misc_feature 1..21: note = HBV-targeting guide sequence portion
  source 1..21: mol_type = other RNA
ggactcaagatgctgtacaga

SEQ ID NO: 10273 - RNA, 21 nt, synthetic construct
  misc_feature 1..21: note = HBV-targeting guide sequence portion
  source 1..21: mol_type = other RNA
ggactcataaggtgggaaatt

SEQ ID NO: 10274 - RNA, 21 nt, synthetic construct
  misc_feature 1..21: note = HBV-targeting guide sequence portion
  source 1..21: mol_type = other RNA
ggactccccgtctgtgccttc

SEQ ID NO: 10275 - RNA, 21 nt, synthetic construct
  misc_feature 1..21: note = HBV-targeting guide sequence portion
  source 1..21: mol_type = other RNA
ggactctctgcaatgtcaacg

SEQ ID NO: 10276 - RNA, 21 nt, synthetic construct
  misc_feature 1..21: note = HBV-targeting guide sequence portion
  source 1..21: mol_type = other RNA
ggactcttggactctctgcaa

SEQ ID NO: 10277 - RNA, 21 nt, synthetic construct
  misc_feature 1..21: note = HBV-targeting guide sequence portion
  source 1..21: mol_type = other RNA
ggactgacaactctgttgtcc

SEQ ID NO: 10278 - RNA, 21 nt, synthetic construct
  misc_feature 1..21: note = HBV-targeting guide sequence portion
  source 1..21: mol_type = other RNA
ggactgcgaattttggccaag

SEQ ID NO: 10279 - RNA, 21 nt, synthetic construct
  misc_feature 1..21: note = HBV-targeting guide sequence portion
  source 1..21: mol_type = other RNA
ggacttcaatcccaacaagga

SEQ ID NO: 10280 - RNA, 21 nt, synthetic construct
  misc_feature 1..21: note = HBV-targeting guide sequence portion
  source 1..21: mol_type = other RNA
ggacttctctcaattttctag

SEQ ID NO: 10281 - RNA, 21 nt, synthetic construct
  misc_feature 1..21: note = HBV-targeting guide sequence portion
  source 1..21: mol_type = other RNA
ggagaacatcacatcaggatt

SEQ ID NO: 10282 - RNA, 21 nt, synthetic construct
  misc_feature 1..21: note = HBV-targeting guide sequence portion
  source 1..21: mol_type = other RNA
ggagaactaatgactctagct

SEQ ID NO: 10283 - RNA, 21 nt, synthetic construct
  misc_feature 1..21: note = HBV-targeting guide sequence portion
  source 1..21: mol_type = other RNA
ggagacagcggggtaggctgc

SEQ ID NO: 10284 - RNA, 21 nt, synthetic construct
  misc_feature 1..21: note = HBV-targeting guide sequence portion
  source 1..21: mol_type = other RNA
ggagaccaccgtgaacgccca

SEQ ID NO: 10285 - RNA, 21 nt, synthetic construct
  misc_feature 1..21: note = HBV-targeting guide sequence portion
  source 1..21: mol_type = other RNA
ggagactccaaggcatcccga

SEQ ID NO: 10286 - RNA, 21 nt, synthetic construct
  misc_feature 1..21: note = HBV-targeting guide sequence portion
  source 1..21: mol_type = other RNA
ggagacttgtgttgttagacg

SEQ ID NO: 10287 - RNA, 21 nt, synthetic construct
  misc_feature 1..21: note = HBV-targeting guide sequence portion
  source 1..21: mol_type = other RNA
ggagaggacaacagagttgtc

SEQ ID NO: 10288 - RNA, 21 nt, synthetic construct
  misc_feature 1..21: note = HBV-targeting guide sequence portion
  source 1..21: mol_type = other RNA
ggagatacaggcctctcactc

SEQ ID NO: 10289 - RNA, 21 nt, synthetic construct
  misc_feature 1..21: note = HBV-targeting guide sequence portion
  source 1..21: mol_type = other RNA
ggagattagattaatgatctt

SEQ ID NO: 10290 - RNA, 21 nt, synthetic construct
  misc_feature 1..21: note = HBV-targeting guide sequence portion
  source 1..21: mol_type = other RNA
ggagcaaacattctcgggact

SEQ ID NO: 10291 - RNA, 21 nt, synthetic construct
  misc_feature 1..21: note = HBV-targeting guide sequence portion
  source 1..21: mol_type = other RNA
ggagcattcgggctagggttc

SEQ ID NO: 10292 - RNA, 21 nt, synthetic construct
  misc_feature 1..21: note = HBV-targeting guide sequence portion
  source 1..21: mol_type = other RNA
ggagccaccagcagggagata

SEQ ID NO: 10293 - RNA, 21 nt, synthetic construct
  misc_feature 1..21: note = HBV-targeting guide sequence portion
  source 1..21: mol_type = other RNA
ggagccctcaggctcagggca

SEQ ID NO: 10294 - RNA, 21 nt, synthetic construct
  misc_feature 1..21: note = HBV-targeting guide sequence portion
  source 1..21: mol_type = other RNA
ggagccggaaaggttccacgc

SEQ ID NO: 10295 - RNA, 21 nt, synthetic construct
  misc_feature 1..21: note = HBV-targeting guide sequence portion
  source 1..21: mol_type = other RNA
ggagctactgtggagttactc

SEQ ID NO: 10296 - RNA, 21 nt, synthetic construct
  misc_feature 1..21: note = HBV-targeting guide sequence portion
  source 1..21: mol_type = other RNA
ggagctggagcattcgggcta

SEQ ID NO: 10297 - RNA, 21 nt, synthetic construct
  misc_feature 1..21: note = HBV-targeting guide sequence portion
  source 1..21: mol_type = other RNA
ggaggacaggaggttggtgag

SEQ ID NO: 10298 - RNA, 21 nt, synthetic construct
  misc_feature 1..21: note = HBV-targeting guide sequence portion
  source 1..21: mol_type = other RNA
ggaggagattagattaatgat

SEQ ID NO: 10299 - RNA, 21 nt, synthetic construct
  misc_feature 1..21: note = HBV-targeting guide sequence portion
  source 1..21: mol_type = other RNA
ggaggagtgcgaatccacact

SEQ ID NO: 10300 - RNA, 21 nt, synthetic construct
  misc_feature 1..21: note = HBV-targeting guide sequence portion
  source 1..21: mol_type = other RNA
ggaggagttgggggaggagat

SEQ ID NO: 10301 - RNA, 21 nt, synthetic construct
  misc_feature 1..21: note = HBV-targeting guide sequence portion
  source 1..21: mol_type = other RNA
ggaggccttttggggtggagc

SEQ ID NO: 10302 - RNA, 21 nt, synthetic construct
  misc_feature 1..21: note = HBV-targeting guide sequence portion
  source 1..21: mol_type = other RNA
ggaggcggatttgctggcaag

SEQ ID NO: 10303 - RNA, 21 nt, synthetic construct
  misc_feature 1..21: note = HBV-targeting guide sequence portion
  source 1..21: mol_type = other RNA
ggaggctgtaggcataaattg

SEQ ID NO: 10304 - RNA, 21 nt, synthetic construct
  misc_feature 1..21: note = HBV-targeting guide sequence portion
  source 1..21: mol_type = other RNA
ggaggcttgaacagtaggaca

SEQ ID NO: 10305 - RNA, 21 nt, synthetic construct
  misc_feature 1..21: note = HBV-targeting guide sequence portion
  source 1..21: mol_type = other RNA
ggagggatacatagaggttcc

SEQ ID NO: 10306 - RNA, 21 nt, synthetic construct
  misc_feature 1..21: note = HBV-targeting guide sequence portion
  source 1..21: mol_type = other RNA
ggaggttggggactgcgaatt

SEQ ID NO: 10307 - RNA, 21 nt, synthetic construct
  misc_feature 1..21: note = HBV-targeting guide sequence portion
  source 1..21: mol_type = other RNA
ggaggttggtgagtgattgga

SEQ ID NO: 10308 - RNA, 21 nt, synthetic construct
  misc_feature 1..21: note = HBV-targeting guide sequence portion
  source 1..21: mol_type = other RNA
ggagtccgcgtaaagagaggt

SEQ ID NO: 10309 - RNA, 21 nt, synthetic construct
  misc_feature 1..21: note = HBV-targeting guide sequence portion
  source 1..21: mol_type = other RNA
ggagtcgtgcaggttctgcag

SEQ ID NO: 10310 - RNA, 21 nt, synthetic construct
  misc_feature 1..21: note = HBV-targeting guide sequence portion
  source 1..21: mol_type = other RNA
ggagtctcctgagcattgttc

SEQ ID NO: 10311 - RNA, 21 nt, synthetic construct
  misc_feature 1..21: note = HBV-targeting guide sequence portion
  source 1..21: mol_type = other RNA
ggagtgcgaatccacactcca

SEQ ID NO: 10312 - RNA, 21 nt, synthetic construct
  misc_feature 1..21: note = HBV-targeting guide sequence portion
  source 1..21: mol_type = other RNA
ggagtgggcctcagcccgttt

SEQ ID NO: 10313 - RNA, 21 nt, synthetic construct
  misc_feature 1..21: note = HBV-targeting guide sequence portion
  source 1..21: mol_type = other RNA
ggagtgtggattcgcactcct

SEQ ID NO: 10314 - RNA, 21 nt, synthetic construct
  misc_feature 1..21: note = HBV-targeting guide sequence portion
  source 1..21: mol_type = other RNA
ggagttactctcgtttttgcc

SEQ ID NO: 10315 - RNA, 21 nt, synthetic construct
  misc_feature 1..21: note = HBV-targeting guide sequence portion
  source 1..21: mol_type = other RNA
ggagttccgcagtatggatcg

SEQ ID NO: 10316 - RNA, 21 nt, synthetic construct
  misc_feature 1..21: note = HBV-targeting guide sequence portion
  source 1..21: mol_type = other RNA
ggagttcttcttctaggggac

SEQ ID NO: 10317 - RNA, 21 nt, synthetic construct
  misc_feature 1..21: note = HBV-targeting guide sequence portion
  source 1..21: mol_type = other RNA
ggagttgggggaggagattag

SEQ ID NO: 10318 - RNA, 21 nt, synthetic construct
  misc_feature 1..21: note = HBV-targeting guide sequence portion
  source 1..21: mol_type = other RNA
ggagtttgctctgaaggctgg

SEQ ID NO: 10319 - RNA, 21 nt, synthetic construct
  misc_feature 1..21: note = HBV-targeting guide sequence portion
  source 1..21: mol_type = other RNA
ggagttttctgaaacattctt

SEQ ID NO: 10320 - RNA, 21 nt, synthetic construct
  misc_feature 1..21: note = HBV-targeting guide sequence portion
  source 1..21: mol_type = other RNA
ggataaaacctagcaggcata

SEQ ID NO: 10321 - RNA, 21 nt, synthetic construct
  misc_feature 1..21: note = HBV-targeting guide sequence portion
  source 1..21: mol_type = other RNA
ggataaccacattgtgtaaaa

SEQ ID NO: 10322 - RNA, 21 nt, synthetic construct
  misc_feature 1..21: note = HBV-targeting guide sequence portion
  source 1..21: mol_type = other RNA
ggataagggtattaaacctta

SEQ ID NO: 10323 - RNA, 21 nt, synthetic construct
  misc_feature 1..21: note = HBV-targeting guide sequence portion
  source 1..21: mol_type = other RNA
ggataataaggtttaataccc

SEQ ID NO: 10324 - RNA, 21 nt, synthetic construct
  misc_feature 1..21: note = HBV-targeting guide sequence portion
  source 1..21: mol_type = other RNA
ggatacatagaggttccttga

SEQ ID NO: 10325 - RNA, 21 nt, synthetic construct
  misc_feature 1..21: note = HBV-targeting guide sequence portion
  source 1..21: mol_type = other RNA
ggatactaacattgagatccc

SEQ ID NO: 10326 - RNA, 21 nt, synthetic construct
  misc_feature 1..21: note = HBV-targeting guide sequence portion
  source 1..21: mol_type = other RNA
ggataggggcatttggtggtc

SEQ ID NO: 10327 - RNA, 21 nt, synthetic construct
  misc_feature 1..21: note = HBV-targeting guide sequence portion
  source 1..21: mol_type = other RNA
ggatcatcaaccaccagcacg

SEQ ID NO: 10328 - RNA, 21 nt, synthetic construct
  misc_feature 1..21: note = HBV-targeting guide sequence portion
  source 1..21: mol_type = other RNA
ggatcattgccacaaaatcac

SEQ ID NO: 10329 - RNA, 21 nt, synthetic construct
  misc_feature 1..21: note = HBV-targeting guide sequence portion
  source 1..21: mol_type = other RNA
ggatccagttggcagcacagc

SEQ ID NO: 10330 - RNA, 21 nt, synthetic construct
  misc_feature 1..21: note = HBV-targeting guide sequence portion
  source 1..21: mol_type = other RNA
ggatccctggccagacgccaa

SEQ ID NO: 10331 - RNA, 21 nt, synthetic construct
  misc_feature 1..21: note = HBV-targeting guide sequence portion
  source 1..21: mol_type = other RNA
ggatcctgcgcgggacgtcct

SEQ ID NO: 10332 - RNA, 21 nt, synthetic construct
  misc_feature 1..21: note = HBV-targeting guide sequence portion
  source 1..21: mol_type = other RNA
ggatccttgttgggattgaag

SEQ ID NO: 10333 - RNA, 21 nt, synthetic construct
  misc_feature 1..21: note = HBV-targeting guide sequence portion
  source 1..21: mol_type = other RNA
ggatcggcagaggagccggaa

SEQ ID NO: 10334 - RNA, 21 nt, synthetic construct
  misc_feature 1..21: note = HBV-targeting guide sequence portion
  source 1..21: mol_type = other RNA
ggatctcaatgttagtatccc

SEQ ID NO: 10335 - RNA, 21 nt, synthetic construct
  misc_feature 1..21: note = HBV-targeting guide sequence portion
  source 1..21: mol_type = other RNA
ggatcttgcagagtttggtgg

SEQ ID NO: 10336 - RNA, 21 nt, synthetic construct
  misc_feature 1..21: note = HBV-targeting guide sequence portion
  source 1..21: mol_type = other RNA
ggatgaagaggaagatgataa

SEQ ID NO: 10337 - RNA, 21 nt, synthetic construct
  misc_feature 1..21: note = HBV-targeting guide sequence portion
  source 1..21: mol_type = other RNA
ggatgagtgtttctcagaggt

SEQ ID NO: 10338 - RNA, 21 nt, synthetic construct
  misc_feature 1..21: note = HBV-targeting guide sequence portion
  source 1..21: mol_type = other RNA
ggatgatgggatgggaataca

SEQ ID NO: 10339 - RNA, 21 nt, synthetic construct
  misc_feature 1..21: note = HBV-targeting guide sequence portion
  source 1..21: mol_type = other RNA
ggatgatgtggtattgggggc

SEQ ID NO: 10340 - RNA, 21 nt, synthetic construct
  misc_feature 1..21: note = HBV-targeting guide sequence portion
  source 1..21: mol_type = other RNA
ggatgccttggagtctcctga

SEQ ID NO: 10341 - RNA, 21 nt, synthetic construct
  misc_feature 1..21: note = HBV-targeting guide sequence portion
  source 1..21: mol_type = other RNA
ggatggaaactgcacctgtat

SEQ ID NO: 10342 - RNA, 21 nt, synthetic construct
  misc_feature 1..21: note = HBV-targeting guide sequence portion
  source 1..21: mol_type = other RNA
ggatgggaatacaggtgcagt

SEQ ID NO: 10343 - RNA, 21 nt, synthetic construct
  misc_feature 1..21: note = HBV-targeting guide sequence portion
  source 1..21: mol_type = other RNA
ggatgtgtctgcggcgtttta

SEQ ID NO: 10344 - RNA, 21 nt, synthetic construct
  misc_feature 1..21: note = HBV-targeting guide sequence portion
  source 1..21: mol_type = other RNA
ggattcagcgccgacgggacg

SEQ ID NO: 10345 - RNA, 21 nt, synthetic construct
  misc_feature 1..21: note = HBV-targeting guide sequence portion
  source 1..21: mol_type = other RNA
ggattcctaggacccctgctc

SEQ ID NO: 10346 - RNA, 21 nt, synthetic construct
  misc_feature 1..21: note = HBV-targeting guide sequence portion
  source 1..21: mol_type = other RNA
ggattcgcactcctccagctt

SEQ ID NO: 10347 - RNA, 21 nt, synthetic construct
  misc_feature 1..21: note = HBV-targeting guide sequence portion
  source 1..21: mol_type = other RNA
ggattcttgtcaacaaggaaa

SEQ ID NO: 10348 - RNA, 21 nt, synthetic construct
  misc_feature 1..21: note = HBV-targeting guide sequence portion
  source 1..21: mol_type = other RNA
ggattctttcccgaccaccag

SEQ ID NO: 10349 - RNA, 21 nt, synthetic construct
  misc_feature 1..21: note = HBV-targeting guide sequence portion
  source 1..21: mol_type = other RNA
ggattgaagtcccaatctgga

SEQ ID NO: 10350 - RNA, 21 nt, synthetic construct
  misc_feature 1..21: note = HBV-targeting guide sequence portion
  source 1..21: mol_type = other RNA
ggattgctggtggaaagattc

SEQ ID NO: 10351 - RNA, 21 nt, synthetic construct
  misc_feature 1..21: note = HBV-targeting guide sequence portion
  source 1..21: mol_type = other RNA
ggattggggaccctgcgctga

SEQ ID NO: 10352 - RNA, 21 nt, synthetic construct
  misc_feature 1..21: note = HBV-targeting guide sequence portion
  source 1..21: mol_type = other RNA
ggattgttggagtttgctctg

SEQ ID NO: 10353 - RNA, 21 nt, synthetic construct
  misc_feature 1..21: note = HBV-targeting guide sequence portion
  source 1..21: mol_type = other RNA
ggatttgctggcaaggtttgc

SEQ ID NO: 10354 - RNA, 21 nt, synthetic construct
  misc_feature 1..21: note = HBV-targeting guide sequence portion
  source 1..21: mol_type = other RNA
ggcaaaaacgagagtaactcc

SEQ ID NO: 10355 - RNA, 21 nt, synthetic construct
  misc_feature 1..21: note = HBV-targeting guide sequence portion
  source 1..21: mol_type = other RNA
ggcaacggccaggtctgtgcc

SEQ ID NO: 10356 - RNA, 21 nt, synthetic construct
  misc_feature 1..21: note = HBV-targeting guide sequence portion
  source 1..21: mol_type = other RNA
ggcaacggggtaaaggttcag

SEQ ID NO: 10357 - RNA, 21 nt, synthetic construct
  misc_feature 1..21: note = HBV-targeting guide sequence portion
  source 1..21: mol_type = other RNA
ggcaagaattggtgggcgttc

SEQ ID NO: 10358 - RNA, 21 nt, synthetic construct
  misc_feature 1..21: note = HBV-targeting guide sequence portion
  source 1..21: mol_type = other RNA
ggcaagcaattctttgctggg

SEQ ID NO: 10359 - RNA, 21 nt, synthetic construct
  misc_feature 1..21: note = HBV-targeting guide sequence portion
  source 1..21: mol_type = other RNA
ggcaaggtttgcattatgccc

SEQ ID NO: 10360 - RNA, 21 nt, synthetic construct
  misc_feature 1..21: note = HBV-targeting guide sequence portion
  source 1..21: mol_type = other RNA
ggcaagtatttggtgaattta

SEQ ID NO: 10361 - RNA, 21 nt, synthetic construct
  misc_feature 1..21: note = HBV-targeting guide sequence portion
  source 1..21: mol_type = other RNA
ggcaatgatccccaacaatca

SEQ ID NO: 10362 - RNA, 21 nt, synthetic construct
  misc_feature 1..21: note = HBV-targeting guide sequence portion
  source 1..21: mol_type = other RNA
ggcacagacctggccgttgcc

SEQ ID NO: 10363 - RNA, 21 nt, synthetic construct
  misc_feature 1..21: note = HBV-targeting guide sequence portion
  source 1..21: mol_type = other RNA
ggcacagacggggagtccgcg

SEQ ID NO: 10364 - RNA, 21 nt, synthetic construct
  misc_feature 1..21: note = HBV-targeting guide sequence portion
  source 1..21: mol_type = other RNA
ggcacagcttggaggcttgaa

SEQ ID NO: 10365 - RNA, 21 nt, synthetic construct
  misc_feature 1..21: note = HBV-targeting guide sequence portion
  source 1..21: mol_type = other RNA
ggcactagtaaactgagccaa

SEQ ID NO: 10366 - RNA, 21 nt, synthetic construct
  misc_feature 1..21: note = HBV-targeting guide sequence portion
  source 1..21: mol_type = other RNA
ggcagaatctttccaccagca

SEQ ID NO: 10367 - RNA, 21 nt, synthetic construct
  misc_feature 1..21: note = HBV-targeting guide sequence portion
  source 1..21: mol_type = other RNA
ggcagagaagaggacgacagg

SEQ ID NO: 10368 - RNA, 21 nt, synthetic construct
  misc_feature 1..21: note = HBV-targeting guide sequence portion
  source 1..21: mol_type = other RNA
ggcagaggagccggaaaggtt

SEQ ID NO: 10369 - RNA, 21 nt, synthetic construct
  misc_feature 1..21: note = HBV-targeting guide sequence portion
  source 1..21: mol_type = other RNA
ggcagaggtgaaaaagttgca

SEQ ID NO: 10370 - RNA, 21 nt, synthetic construct
  misc_feature 1..21: note = HBV-targeting guide sequence portion
  source 1..21: mol_type = other RNA
ggcagatgagaaggcacagac

SEQ ID NO: 10371 - RNA, 21 nt, synthetic construct
  misc_feature 1..21: note = HBV-targeting guide sequence portion
  source 1..21: mol_type = other RNA
ggcagcaaaacccagaagacc

SEQ ID NO: 10372 - RNA, 21 nt, synthetic construct
  misc_feature 1..21: note = HBV-targeting guide sequence portion
  source 1..21: mol_type = other RNA
ggcagcacagcctagcagcca

SEQ ID NO: 10373 - RNA, 21 nt, synthetic construct
  misc_feature 1..21: note = HBV-targeting guide sequence portion
  source 1..21: mol_type = other RNA
ggcagcctaccccgctgtctc

SEQ ID NO: 10374 - RNA, 21 nt, synthetic construct
  misc_feature 1..21: note = HBV-targeting guide sequence portion
  source 1..21: mol_type = other RNA
ggcaggaggcggatttgctgg

SEQ ID NO: 10375 - RNA, 21 nt, synthetic construct
  misc_feature 1..21: note = HBV-targeting guide sequence portion
  source 1..21: mol_type = other RNA
ggcaggcagagaagaggacga

SEQ ID NO: 10376 - RNA, 21 nt, synthetic construct
  misc_feature 1..21: note = HBV-targeting guide sequence portion
  source 1..21: mol_type = other RNA
ggcaggtcccctagaagaaga

SEQ ID NO: 10377 - RNA, 21 nt, synthetic construct
  misc_feature 1..21: note = HBV-targeting guide sequence portion
  source 1..21: mol_type = other RNA
ggcagtagtcggaacagggtt

SEQ ID NO: 10378 - RNA, 21 nt, synthetic construct
  misc_feature 1..21: note = HBV-targeting guide sequence portion
  source 1..21: mol_type = other RNA
ggcataaattggtctgcgcac

SEQ ID NO: 10379 - RNA, 21 nt, synthetic construct
  misc_feature 1..21: note = HBV-targeting guide sequence portion
  source 1..21: mol_type = other RNA
ggcataatcaatttcaaccgt

SEQ ID NO: 10380 - RNA, 21 nt, synthetic construct
  misc_feature 1..21: note = HBV-targeting guide sequence portion
  source 1..21: mol_type = other RNA
ggcataatgcaaaccttgcca

SEQ ID NO: 10381 - RNA, 21 nt, synthetic construct
  misc_feature 1..21: note = HBV-targeting guide sequence portion
  source 1..21: mol_type = other RNA
ggcatacttcaaagactgttt

SEQ ID NO: 10382 - RNA, 21 nt, synthetic construct
  misc_feature 1..21: note = HBV-targeting guide sequence portion
  source 1..21: mol_type = other RNA
ggcatagcagcaggatgaaga

SEQ ID NO: 10383 - RNA, 21 nt, synthetic construct
  misc_feature 1..21: note = HBV-targeting guide sequence portion
  source 1..21: mol_type = other RNA
ggcatcccgatacagagctgc

SEQ ID NO: 10384 - RNA, 21 nt, synthetic construct
  misc_feature 1..21: note = HBV-targeting guide sequence portion
  source 1..21: mol_type = other RNA
ggcatggacattgacccatat

SEQ ID NO: 10385 - RNA, 21 nt, synthetic construct
  misc_feature 1..21: note = HBV-targeting guide sequence portion
  source 1..21: mol_type = other RNA
ggcattaaagcaggataacca

SEQ ID NO: 10386 - RNA, 21 nt, synthetic construct
  misc_feature 1..21: note = HBV-targeting guide sequence portion
  source 1..21: mol_type = other RNA
ggcatttggtggtctataagc

SEQ ID NO: 10387 - RNA, 21 nt, synthetic construct
  misc_feature 1..21: note = HBV-targeting guide sequence portion
  source 1..21: mol_type = other RNA
ggccaaaattcgcagtcccca

SEQ ID NO: 10388 - RNA, 21 nt, synthetic construct
  misc_feature 1..21: note = HBV-targeting guide sequence portion
  source 1..21: mol_type = other RNA
ggccaagacacacggtagttc

SEQ ID NO: 10389 - RNA, 21 nt, synthetic construct
  misc_feature 1..21: note = HBV-targeting guide sequence portion
  source 1..21: mol_type = other RNA
ggccaagtctgtacagcatct

SEQ ID NO: 10390 - RNA, 21 nt, synthetic construct
  misc_feature 1..21: note = HBV-targeting guide sequence portion
  source 1..21: mol_type = other RNA
ggccagacgccaacaaggtag

SEQ ID NO: 10391 - RNA, 21 nt, synthetic construct
  misc_feature 1..21: note = HBV-targeting guide sequence portion
  source 1..21: mol_type = other RNA
ggccagggatccttgttggga

SEQ ID NO: 10392 - RNA, 21 nt, synthetic construct
  misc_feature 1..21: note = HBV-targeting guide sequence portion
  source 1..21: mol_type = other RNA
ggccaggtctgtgccaagtgt

SEQ ID NO: 10393 - RNA, 21 nt, synthetic construct
  misc_feature 1..21: note = HBV-targeting guide sequence portion
  source 1..21: mol_type = other RNA
ggccatcagcgcatgcgtgga

SEQ ID NO: 10394 - RNA, 21 nt, synthetic construct
  misc_feature 1..21: note = HBV-targeting guide sequence portion
  source 1..21: mol_type = other RNA
ggcccactcccataggaattt

SEQ ID NO: 10395 - RNA, 21 nt, synthetic construct
  misc_feature 1..21: note = HBV-targeting guide sequence portion
  source 1..21: mol_type = other RNA
ggcccatatgagtgttgacat

SEQ ID NO: 10396 - RNA, 21 nt, synthetic construct
  misc_feature 1..21: note = HBV-targeting guide sequence portion
  source 1..21: mol_type = other RNA
ggccccaagcggcctcgagat

SEQ ID NO: 10397 - RNA, 21 nt, synthetic construct
  misc_feature 1..21: note = HBV-targeting guide sequence portion
  source 1..21: mol_type = other RNA
ggcccccaataccacatcatc

SEQ ID NO: 10398 - RNA, 21 nt, synthetic construct
  misc_feature 1..21: note = HBV-targeting guide sequence portion
  source 1..21: mol_type = other RNA
ggcccgcttacagttaatgag

SEQ ID NO: 10399 - RNA, 21 nt, synthetic construct
  misc_feature 1..21: note = HBV-targeting guide sequence portion
  source 1..21: mol_type = other RNA
ggccctgtcgtcctcttctct

SEQ ID NO: 10400 - RNA, 21 nt, synthetic construct
  misc_feature 1..21: note = HBV-targeting guide sequence portion
  source 1..21: mol_type = other RNA
ggccgcttggggccctgtcgt

SEQ ID NO: 10401 - RNA, 21 nt, synthetic construct
  misc_feature 1..21: note = HBV-targeting guide sequence portion
  source 1..21: mol_type = other RNA
ggccgttgcctggcaacgggg

SEQ ID NO: 10402 - RNA, 21 nt, synthetic construct
  misc_feature 1..21: note = HBV-targeting guide sequence portion
  source 1..21: mol_type = other RNA
ggcctaaagttcagacaacta

SEQ ID NO: 10403 - RNA, 21 nt, synthetic construct
  misc_feature 1..21: note = HBV-targeting guide sequence portion
  source 1..21: mol_type = other RNA
ggcctacaaactgttcacatt

SEQ ID NO: 10404 - RNA, 21 nt, synthetic construct
  misc_feature 1..21: note = HBV-targeting guide sequence portion
  source 1..21: mol_type = other RNA
ggcctatgaccaagccccaac

SEQ ID NO: 10405 - RNA, 21 nt, synthetic construct
  misc_feature 1..21: note = HBV-targeting guide sequence portion
  source 1..21: mol_type = other RNA
ggcctattgattggaaagtgt

SEQ ID NO: 10406 - RNA, 21 nt, synthetic construct
  misc_feature 1..21: note = HBV-targeting guide sequence portion
  source 1..21: mol_type = other RNA
ggcctcagcccgtttctcttg

SEQ ID NO: 10407 - RNA, 21 nt, synthetic construct
  misc_feature 1..21: note = HBV-targeting guide sequence portion
  source 1..21: mol_type = other RNA
ggcctccgtgcggtggggtga

SEQ ID NO: 10408 - RNA, 21 nt, synthetic construct
  misc_feature 1..21: note = HBV-targeting guide sequence portion
  source 1..21: mol_type = other RNA
ggcctcgagatgggtcgtccg

SEQ ID NO: 10409 - RNA, 21 nt, synthetic construct
  misc_feature 1..21: note = HBV-targeting guide sequence portion
  source 1..21: mol_type = other RNA
ggcctctcactctgggatctt

SEQ ID NO: 10410 - RNA, 21 nt, synthetic construct
  misc_feature 1..21: note = HBV-targeting guide sequence portion
  source 1..21: mol_type = other RNA
ggcctgaggatgagtgtttct

SEQ ID NO: 10411 - RNA, 21 nt, synthetic construct
  misc_feature 1..21: note = HBV-targeting guide sequence portion
  source 1..21: mol_type = other RNA
ggcctgtatctccctgctggt

SEQ ID NO: 10412 - RNA, 21 nt, synthetic construct
  misc_feature 1..21: note = HBV-targeting guide sequence portion
  source 1..21: mol_type = other RNA
ggcctgttaaccgggagtttt

SEQ ID NO: 10413 - RNA, 21 nt, synthetic construct
  misc_feature 1..21: note = HBV-targeting guide sequence portion
  source 1..21: mol_type = other RNA
ggccttgtaagttggcgaaaa

SEQ ID NO: 10414 - RNA, 21 nt, synthetic construct
  misc_feature 1..21: note = HBV-targeting guide sequence portion
  source 1..21: mol_type = other RNA
ggcctttctgtgtaaacaata

SEQ ID NO: 10415 - RNA, 21 nt, synthetic construct
  misc_feature 1..21: note = HBV-targeting guide sequence portion
  source 1..21: mol_type = other RNA
ggccttttggggtggagccct

SEQ ID NO: 10416 - RNA, 21 nt, synthetic construct
  misc_feature 1..21: note = HBV-targeting guide sequence portion
  source 1..21: mol_type = other RNA
ggcgaaaaagtgaaagcctgc

SEQ ID NO: 10417 - RNA, 21 nt, synthetic construct
  misc_feature 1..21: note = HBV-targeting guide sequence portion
  source 1..21: mol_type = other RNA
ggcgagggagttcttcttcta

SEQ ID NO: 10418 - RNA, 21 nt, synthetic construct
  misc_feature 1..21: note = HBV-targeting guide sequence portion
  source 1..21: mol_type = other RNA
ggcgattgagatcttcgtctg

SEQ ID NO: 10419 - RNA, 21 nt, synthetic construct
  misc_feature 1..21: note = HBV-targeting guide sequence portion
  source 1..21: mol_type = other RNA
ggcgattggtagaggcaggag

SEQ ID NO: 10420 - RNA, 21 nt, synthetic construct
  misc_feature 1..21: note = HBV-targeting guide sequence portion
  source 1..21: mol_type = other RNA
ggcgcacctctctttacgcgg

SEQ ID NO: 10421 - RNA, 21 nt, synthetic construct
  misc_feature 1..21: note = HBV-targeting guide sequence portion
  source 1..21: mol_type = other RNA
ggcgctatgtgttgacactct

SEQ ID NO: 10422 - RNA, 21 nt, synthetic construct
  misc_feature 1..21: note = HBV-targeting guide sequence portion
  source 1..21: mol_type = other RNA
ggcgctgaatcccgcggacga

SEQ ID NO: 10423 - RNA, 21 nt, synthetic construct
  misc_feature 1..21: note = HBV-targeting guide sequence portion
  source 1..21: mol_type = other RNA
ggcggatttgctggcaaggtt

SEQ ID NO: 10424 - RNA, 21 nt, synthetic construct
  misc_feature 1..21: note = HBV-targeting guide sequence portion
  source 1..21: mol_type = other RNA
ggcggggttttccttgttgac

SEQ ID NO: 10425 - RNA, 21 nt, synthetic construct
  misc_feature 1..21: note = HBV-targeting guide sequence portion
  source 1..21: mol_type = other RNA
ggcgggtgttttatataagag

SEQ ID NO: 10426 - RNA, 21 nt, synthetic construct
  misc_feature 1..21: note = HBV-targeting guide sequence portion
  source 1..21: mol_type = other RNA
ggcggtatctagaagatctcg

SEQ ID NO: 10427 - RNA, 21 nt, synthetic construct
  misc_feature 1..21: note = HBV-targeting guide sequence portion
  source 1..21: mol_type = other RNA
ggcgtctggccagggatcctt

SEQ ID NO: 10428 - RNA, 21 nt, synthetic construct
  misc_feature 1..21: note = HBV-targeting guide sequence portion
  source 1..21: mol_type = other RNA
ggcgttcacggtggtctccat

SEQ ID NO: 10429 - RNA, 21 nt, synthetic construct
  misc_feature 1..21: note = HBV-targeting guide sequence portion
  source 1..21: mol_type = other RNA
ggcgttttatcatcttcctct

SEQ ID NO: 10430 - RNA, 21 nt, synthetic construct
  misc_feature 1..21: note = HBV-targeting guide sequence portion
  source 1..21: mol_type = other RNA
ggctaggagttccgcagtatg

SEQ ID NO: 10431 - RNA, 21 nt, synthetic construct
  misc_feature 1..21: note = HBV-targeting guide sequence portion
  source 1..21: mol_type = other RNA
ggctagggttcaccccaccgc

SEQ ID NO: 10432 - RNA, 21 nt, synthetic construct
  misc_feature 1..21: note = HBV-targeting guide sequence portion
  source 1..21: mol_type = other RNA
ggctatgtcattgattgttgg

SEQ ID NO: 10433 - RNA, 21 nt, synthetic construct
  misc_feature 1..21: note = HBV-targeting guide sequence portion
  source 1..21: mol_type = other RNA
ggctcagggcataatgcaaac

SEQ ID NO: 10434 - RNA, 21 nt, synthetic construct
  misc_feature 1..21: note = HBV-targeting guide sequence portion
  source 1..21: mol_type = other RNA
ggctcagtttactagtgccat

SEQ ID NO: 10435 - RNA, 21 nt, synthetic construct
  misc_feature 1..21: note = HBV-targeting guide sequence portion
  source 1..21: mol_type = other RNA
ggctccaccccaaaaggcctc

SEQ ID NO: 10436 - RNA, 21 nt, synthetic construct
  misc_feature 1..21: note = HBV-targeting guide sequence portion
  source 1..21: mol_type = other RNA
ggctccagttcaggaacagta

SEQ ID NO: 10437 - RNA, 21 nt, synthetic construct
  misc_feature 1..21: note = HBV-targeting guide sequence portion
  source 1..21: mol_type = other RNA
ggctcctctgccgatccatac

SEQ ID NO: 10438 - RNA, 21 nt, synthetic construct
  misc_feature 1..21: note = HBV-targeting guide sequence portion
  source 1..21: mol_type = other RNA
ggctgaggcccactcccatag

SEQ ID NO: 10439 - RNA, 21 nt, synthetic construct
  misc_feature 1..21: note = HBV-targeting guide sequence portion
  source 1..21: mol_type = other RNA
ggctgccgtcctgactggcga

SEQ ID NO: 10440 - RNA, 21 nt, synthetic construct
  misc_feature 1..21: note = HBV-targeting guide sequence portion
  source 1..21: mol_type = other RNA
ggctgcgagcaaaacaagcgg

SEQ ID NO: 10441 - RNA, 21 nt, synthetic construct
  misc_feature 1..21: note = HBV-targeting guide sequence portion
  source 1..21: mol_type = other RNA
ggctgctaggctgtgctgcca

SEQ ID NO: 10442 - RNA, 21 nt, synthetic construct
  misc_feature 1..21: note = HBV-targeting guide sequence portion
  source 1..21: mol_type = other RNA
ggctgggtccaactggtggtc

SEQ ID NO: 10443 - RNA, 21 nt, synthetic construct
  misc_feature 1..21: note = HBV-targeting guide sequence portion
  source 1..21: mol_type = other RNA
ggctgtaggcataaattggtc

SEQ ID NO: 10444 - RNA, 21 nt, synthetic construct
  misc_feature 1..21: note = HBV-targeting guide sequence portion
  source 1..21: mol_type = other RNA
ggctgtgctgccaactggatc

SEQ ID NO: 10445 - RNA, 21 nt, synthetic construct
  misc_feature 1..21: note = HBV-targeting guide sequence portion
  source 1..21: mol_type = other RNA
ggcttgaacagtaggacatga

SEQ ID NO: 10446 - RNA, 21 nt, synthetic construct
  misc_feature 1..21: note = HBV-targeting guide sequence portion
  source 1..21: mol_type = other RNA
ggcttggtcataggccatcag

SEQ ID NO: 10447 - RNA, 21 nt, synthetic construct
  misc_feature 1..21: note = HBV-targeting guide sequence portion
  source 1..21: mol_type = other RNA
ggctttagggcatggacattg

SEQ ID NO: 10448 - RNA, 21 nt, synthetic construct
  misc_feature 1..21: note = HBV-targeting guide sequence portion
  source 1..21: mol_type = other RNA
ggctttattcttctactgtac

SEQ ID NO: 10449 - RNA, 21 nt, synthetic construct
  misc_feature 1..21: note = HBV-targeting guide sequence portion
  source 1..21: mol_type = other RNA
ggctttcactttttcgccaac

SEQ ID NO: 10450 - RNA, 21 nt, synthetic construct
  misc_feature 1..21: note = HBV-targeting guide sequence portion
  source 1..21: mol_type = other RNA
ggctttcagttatatggatga

SEQ ID NO: 10451 - RNA, 21 nt, synthetic construct
  misc_feature 1..21: note = HBV-targeting guide sequence portion
  source 1..21: mol_type = other RNA
ggctttcccccactgtttggc

SEQ ID NO: 10452 - RNA, 21 nt, synthetic construct
  misc_feature 1..21: note = HBV-targeting guide sequence portion
  source 1..21: mol_type = other RNA
ggctttcggaaaattcctatg

SEQ ID NO: 10453 - RNA, 21 nt, synthetic construct
  misc_feature 1..21: note = HBV-targeting guide sequence portion
  source 1..21: mol_type = other RNA
gggaaacataccttgatagtc

SEQ ID NO: 10454 - RNA, 21 nt, synthetic construct
  misc_feature 1..21: note = HBV-targeting guide sequence portion
  source 1..21: mol_type = other RNA
gggaaagaatcccagaggatt

SEQ ID NO: 10455 - RNA, 21 nt, synthetic construct
  misc_feature 1..21: note = HBV-targeting guide sequence portion
  source 1..21: mol_type = other RNA
gggaaagccctacgaaccact

SEQ ID NO: 10456 - RNA, 21 nt, synthetic construct
  misc_feature 1..21: note = HBV-targeting guide sequence portion
  source 1..21: mol_type = other RNA
gggaaattttacggggcttta

SEQ ID NO: 10457 - RNA, 21 nt, synthetic construct
  misc_feature 1..21: note = HBV-targeting guide sequence portion
  source 1..21: mol_type = other RNA
gggaacaagagctacagcatg

SEQ ID NO: 10458 - RNA, 21 nt, synthetic construct
  misc_feature 1..21: note = HBV-targeting guide sequence portion
  source 1..21: mol_type = other RNA
gggaacgatgtatatttgcgg

SEQ ID NO: 10459 - RNA, 21 nt, synthetic construct
  misc_feature 1..21: note = HBV-targeting guide sequence portion
  source 1..21: mol_type = other RNA
gggaactaccgtgtgtcttgg

SEQ ID NO: 10460 - RNA, 21 nt, synthetic construct
  misc_feature 1..21: note = HBV-targeting guide sequence portion
  source 1..21: mol_type = other RNA
gggaatacaggtgcagtttcc

SEQ ID NO: 10461 - RNA, 21 nt, synthetic construct
  misc_feature 1..21: note = HBV-targeting guide sequence portion
  source 1..21: mol_type = other RNA
gggaccctgcagaacctgcac

SEQ ID NO: 10462 - RNA, 21 nt, synthetic construct
  misc_feature 1..21: note = HBV-targeting guide sequence portion
  source 1..21: mol_type = other RNA
gggaccctgcgctgaacatgg

SEQ ID NO: 10463 - RNA, 21 nt, synthetic construct
  misc_feature 1..21: note = HBV-targeting guide sequence portion
  source 1..21: mol_type = other RNA
gggacctagtagtcagttatg

SEQ ID NO: 10464 - RNA, 21 nt, synthetic construct
  misc_feature 1..21: note = HBV-targeting guide sequence portion
  source 1..21: mol_type = other RNA
gggacctgcctcgtcgtctaa

SEQ ID NO: 10465 - RNA, 21 nt, synthetic construct
  misc_feature 1..21: note = HBV-targeting guide sequence portion
  source 1..21: mol_type = other RNA
gggacgtaaacaaaggacgtc

SEQ ID NO: 10466 - RNA, 21 nt, synthetic construct
  misc_feature 1..21: note = HBV-targeting guide sequence portion
  source 1..21: mol_type = other RNA
gggacgtcctttgtttacgtc

SEQ ID NO: 10467 - RNA, 21 nt, synthetic construct
  misc_feature 1..21: note = HBV-targeting guide sequence portion
  source 1..21: mol_type = other RNA
gggactcaagatgctgtacag

SEQ ID NO: 10468 - RNA, 21 nt, synthetic construct
  misc_feature 1..21: note = HBV-targeting guide sequence portion
  source 1..21: mol_type = other RNA
gggactgacaactctgttgtc

SEQ ID NO: 10469 - RNA, 21 nt, synthetic construct
  misc_feature 1..21: note = HBV-targeting guide sequence portion
  source 1..21: mol_type = other RNA
gggactgcgaattttggccaa

SEQ ID NO: 10470 - RNA, 21 nt, synthetic construct
  misc_feature 1..21: note = HBV-targeting guide sequence portion
  source 1..21: mol_type = other RNA
gggacttcaatcccaacaagg

SEQ ID NO: 10471 - RNA, 21 nt, synthetic construct
  misc_feature 1..21: note = HBV-targeting guide sequence portion
  source 1..21: mol_type = other RNA
gggagaactaatgactctagc

SEQ ID NO: 10472 - RNA, 21 nt, synthetic construct
  misc_feature 1..21: note = HBV-targeting guide sequence portion
  source 1..21: mol_type = other RNA
gggagaggacaacagagttgt

SEQ ID NO: 10473 - RNA, 21 nt, synthetic construct
  misc_feature 1..21: note = HBV-targeting guide sequence portion
  source 1..21: mol_type = other RNA
gggagatacaggcctctcact

SEQ ID NO: 10474 - RNA, 21 nt, synthetic construct
  misc_feature 1..21: note = HBV-targeting guide sequence portion
  source 1..21: mol_type = other RNA
gggaggagattagattaatga

SEQ ID NO: 10475 - RNA, 21 nt, synthetic construct
  misc_feature 1..21: note = HBV-targeting guide sequence portion
  source 1..21: mol_type = other RNA
gggaggagttgggggaggaga

SEQ ID NO: 10476 - RNA, 21 nt, synthetic construct
  misc_feature 1..21: note = HBV-targeting guide sequence portion
  source 1..21: mol_type = other RNA
gggagtccgcgtaaagagagg

SEQ ID NO: 10477 - RNA, 21 nt, synthetic construct
  misc_feature 1..21: note = HBV-targeting guide sequence portion
  source 1..21: mol_type = other RNA
gggagtgggcctcagcccgtt

SEQ ID NO: 10478 - RNA, 21 nt, synthetic construct
  misc_feature 1..21: note = HBV-targeting guide sequence portion
  source 1..21: mol_type = other RNA
gggagttcttcttctagggga

SEQ ID NO: 10479 - RNA, 21 nt, synthetic construct
  misc_feature 1..21: note = HBV-targeting guide sequence portion
  source 1..21: mol_type = other RNA
gggagttttctgaaacattct

SEQ ID NO: 10480 - RNA, 21 nt, synthetic construct
  misc_feature 1..21: note = HBV-targeting guide sequence portion
  source 1..21: mol_type = other RNA
gggatacatagaggttccttg

SEQ ID NO: 10481 - RNA, 21 nt, synthetic construct
  misc_feature 1..21: note = HBV-targeting guide sequence portion
  source 1..21: mol_type = other RNA
gggatactaacattgagatcc

SEQ ID NO: 10482 - RNA, 21 nt, synthetic construct
  misc_feature 1..21: note = HBV-targeting guide sequence portion
  source 1..21: mol_type = other RNA
gggatcattgccacaaaatca

SEQ ID NO: 10483 - RNA, 21 nt, synthetic construct
  misc_feature 1..21: note = HBV-targeting guide sequence portion
  source 1..21: mol_type = other RNA
gggatccttgttgggattgaa

SEQ ID NO: 10484 - RNA, 21 nt, synthetic construct
  misc_feature 1..21: note = HBV-targeting guide sequence portion
  source 1..21: mol_type = other RNA
gggatctcaatgttagtatcc

SEQ ID NO: 10485 - RNA, 21 nt, synthetic construct
  misc_feature 1..21: note = HBV-targeting guide sequence portion
  source 1..21: mol_type = other RNA
gggatcttgcagagtttggtg

SEQ ID NO: 10486 - RNA, 21 nt, synthetic construct
  misc_feature 1..21: note = HBV-targeting guide sequence portion
  source 1..21: mol_type = other RNA
gggatgccttggagtctcctg

SEQ ID NO: 10487 - RNA, 21 nt, synthetic construct
  misc_feature 1..21: note = HBV-targeting guide sequence portion
  source 1..21: mol_type = other RNA
gggatgggaatacaggtgcag

SEQ ID NO: 10488 - RNA, 21 nt, synthetic construct
  misc_feature 1..21: note = HBV-targeting guide sequence portion
  source 1..21: mol_type = other RNA
gggattcagcgccgacgggac

SEQ ID NO: 10489 - RNA, 21 nt, synthetic construct
  misc_feature 1..21: note = HBV-targeting guide sequence portion
  source 1..21: mol_type = other RNA
gggattctttcccgaccacca

SEQ ID NO: 10490 - RNA, 21 nt, synthetic construct
  misc_feature 1..21: note = HBV-targeting guide sequence portion
  source 1..21: mol_type = other RNA
gggattgaagtcccaatctgg

SEQ ID NO: 10491 - RNA, 21 nt, synthetic construct
  misc_feature 1..21: note = HBV-targeting guide sequence portion
  source 1..21: mol_type = other RNA
gggcaagaattggtgggcgtt

SEQ ID NO: 10492 - RNA, 21 nt, synthetic construct
  misc_feature 1..21: note = HBV-targeting guide sequence portion
  source 1..21: mol_type = other RNA
gggcaagtatttggtgaattt

SEQ ID NO: 10493 - RNA, 21 nt, synthetic construct
  misc_feature 1..21: note = HBV-targeting guide sequence portion
  source 1..21: mol_type = other RNA
gggcagaatctttccaccagc

SEQ ID NO: 10494 - RNA, 21 nt, synthetic construct
  misc_feature 1..21: note = HBV-targeting guide sequence portion
  source 1..21: mol_type = other RNA
gggcagcaaaacccagaagac

SEQ ID NO: 10495 - RNA, 21 nt, synthetic construct
  misc_feature 1..21: note = HBV-targeting guide sequence portion
  source 1..21: mol_type = other RNA
gggcataatgcaaaccttgcc

SEQ ID NO: 10496 - RNA, 21 nt, synthetic construct
  misc_feature 1..21: note = HBV-targeting guide sequence portion
  source 1..21: mol_type = other RNA
gggcatggacattgacccata

SEQ ID NO: 10497 - RNA, 21 nt, synthetic construct
  misc_feature 1..21: note = HBV-targeting guide sequence portion
  source 1..21: mol_type = other RNA
gggcattaaagcaggataacc

SEQ ID NO: 10498 - RNA, 21 nt, synthetic construct
  misc_feature 1..21: note = HBV-targeting guide sequence portion
  source 1..21: mol_type = other RNA
gggcatttggtggtctataag

SEQ ID NO: 10499 - RNA, 21 nt, synthetic construct
  misc_feature 1..21: note = HBV-targeting guide sequence portion
  source 1..21: mol_type = other RNA
gggccaagtctgtacagcatc

SEQ ID NO: 10500 - RNA, 21 nt, synthetic construct
  misc_feature 1..21: note = HBV-targeting guide sequence portion
  source 1..21: mol_type = other RNA
gggccccaagcggcctcgaga

SEQ ID NO: 10501 - RNA, 21 nt, synthetic construct
  misc_feature 1..21: note = HBV-targeting guide sequence portion
  source 1..21: mol_type = other RNA
gggccctgtcgtcctcttctc

SEQ ID NO: 10502 - RNA, 21 nt, synthetic construct
  misc_feature 1..21: note = HBV-targeting guide sequence portion
  source 1..21: mol_type = other RNA
gggcctaaagttcagacaact

SEQ ID NO: 10503 - RNA, 21 nt, synthetic construct
  misc_feature 1..21: note = HBV-targeting guide sequence portion
  source 1..21: mol_type = other RNA
gggcctacaaactgttcacat

SEQ ID NO: 10504 - RNA, 21 nt, synthetic construct
  misc_feature 1..21: note = HBV-targeting guide sequence portion
  source 1..21: mol_type = other RNA
gggcctcagcccgtttctctt

SEQ ID NO: 10505 - RNA, 21 nt, synthetic construct
  misc_feature 1..21: note = HBV-targeting guide sequence portion
  source 1..21: mol_type = other RNA
gggcgcacctctctttacgcg

SEQ ID NO: 10506 - RNA, 21 nt, synthetic construct
  misc_feature 1..21: note = HBV-targeting guide sequence portion
  source 1..21: mol_type = other RNA
gggcgttcacggtggtctcca

SEQ ID NO: 10507 - RNA, 21 nt, synthetic construct
  misc_feature 1..21: note = HBV-targeting guide sequence portion
  source 1..21: mol_type = other RNA
gggctagggttcaccccaccg

SEQ ID NO: 10508 - RNA, 21 nt, synthetic construct
  misc_feature 1..21: note = HBV-targeting guide sequence portion
  source 1..21: mol_type = other RNA
gggctatgtcattgattgttg

SEQ ID NO: 10509 - RNA, 21 nt, synthetic construct
  misc_feature 1..21: note = HBV-targeting guide sequence portion
  source 1..21: mol_type = other RNA
gggctccaccccaaaaggcct

SEQ ID NO: 10510 - RNA, 21 nt, synthetic construct
  misc_feature 1..21: note = HBV-targeting guide sequence portion
  source 1..21: mol_type = other RNA
gggctgaggcccactcccata

SEQ ID NO: 10511 - RNA, 21 nt, synthetic construct
  misc_feature 1..21: note = HBV-targeting guide sequence portion
  source 1..21: mol_type = other RNA
gggcttggtcataggccatca

SEQ ID NO: 10512 - RNA, 21 nt, synthetic construct
  misc_feature 1..21: note = HBV-targeting guide sequence portion
  source 1..21: mol_type = other RNA
gggctttattcttctactgta

SEQ ID NO: 10513 - RNA, 21 nt, synthetic construct
  misc_feature 1..21: note = HBV-targeting guide sequence portion
  source 1..21: mol_type = other RNA
gggctttcccccactgtttgg

SEQ ID NO: 10514 - RNA, 21 nt, synthetic construct
  misc_feature 1..21: note = HBV-targeting guide sequence portion
  source 1..21: mol_type = other RNA
gggctttcggaaaattcctat

SEQ ID NO: 10515 - RNA, 21 nt, synthetic construct
  misc_feature 1..21: note = HBV-targeting guide sequence portion
  source 1..21: mol_type = other RNA
ggggaaagccctacgaaccac

SEQ ID NO: 10516 - RNA, 21 nt, synthetic construct
  misc_feature 1..21: note = HBV-targeting guide sequence portion
  source 1..21: mol_type = other RNA
ggggaactaccgtgtgtcttg

SEQ ID NO: 10517 - RNA, 21 nt, synthetic construct
  misc_feature 1..21: note = HBV-targeting guide sequence portion
  source 1..21: mol_type = other RNA
ggggaccctgcgctgaacatg

SEQ ID NO: 10518 - RNA, 21 nt, synthetic construct
  misc_feature 1..21: note = HBV-targeting guide sequence portion
  source 1..21: mol_type = other RNA
ggggacctgcctcgtcgtcta

SEQ ID NO: 10519 - RNA, 21 nt, synthetic construct
  misc_feature 1..21: note = HBV-targeting guide sequence portion
  source 1..21: mol_type = other RNA
ggggactgcgaattttggcca

SEQ ID NO: 10520 - RNA, 21 nt, synthetic construct
  misc_feature 1..21: note = HBV-targeting guide sequence portion
  source 1..21: mol_type = other RNA
ggggagaactaatgactctag

SEQ ID NO: 10521 - RNA, 21 nt, synthetic construct
  misc_feature 1..21: note = HBV-targeting guide sequence portion
  source 1..21: mol_type = other RNA
ggggaggagattagattaatg

SEQ ID NO: 10522 - RNA, 21 nt, synthetic construct
  misc_feature 1..21: note = HBV-targeting guide sequence portion
  source 1..21: mol_type = other RNA
ggggagtccgcgtaaagagag

SEQ ID NO: 10523 - RNA, 21 nt, synthetic construct
  misc_feature 1..21: note = HBV-targeting guide sequence portion
  source 1..21: mol_type = other RNA
ggggatcattgccacaaaatc

SEQ ID NO: 10524 - RNA, 21 nt, synthetic construct
  misc_feature 1..21: note = HBV-targeting guide sequence portion
  source 1..21: mol_type = other RNA
ggggatctcaatgttagtatc

SEQ ID NO: 10525 - RNA, 21 nt, synthetic construct
  misc_feature 1..21: note = HBV-targeting guide sequence portion
  source 1..21: mol_type = other RNA
ggggcagaatctttccaccag

SEQ ID NO: 10526 - RNA, 21 nt, synthetic construct
  misc_feature 1..21: note = HBV-targeting guide sequence portion
  source 1..21: mol_type = other RNA
ggggcagcaaaacccagaaga

SEQ ID NO: 10527 - RNA, 21 nt, synthetic construct
  misc_feature 1..21: note = HBV-targeting guide sequence portion
  source 1..21: mol_type = other RNA
ggggcatttggtggtctataa

SEQ ID NO: 10528 - RNA, 21 nt, synthetic construct
  misc_feature 1..21: note = HBV-targeting guide sequence portion
  source 1..21: mol_type = other RNA
ggggccaagtctgtacagcat

SEQ ID NO: 10529 - RNA, 21 nt, synthetic construct
  misc_feature 1..21: note = HBV-targeting guide sequence portion
  source 1..21: mol_type = other RNA
ggggccctgtcgtcctcttct

SEQ ID NO: 10530 - RNA, 21 nt, synthetic construct
  misc_feature 1..21: note = HBV-targeting guide sequence portion
  source 1..21: mol_type = other RNA
ggggcgcacctctctttacgc

SEQ ID NO: 10531 - RNA, 21 nt, synthetic construct
  misc_feature 1..21: note = HBV-targeting guide sequence portion
  source 1..21: mol_type = other RNA
ggggcttggtcataggccatc

SEQ ID NO: 10532 - RNA, 21 nt, synthetic construct
  misc_feature 1..21: note = HBV-targeting guide sequence portion
  source 1..21: mol_type = other RNA
ggggctttattcttctactgt

SEQ ID NO: 10533 - RNA, 21 nt, synthetic construct
  misc_feature 1..21: note = HBV-targeting guide sequence portion
  source 1..21: mol_type = other RNA
gggggaaagccctacgaacca

SEQ ID NO: 10534 - RNA, 21 nt, synthetic construct
  misc_feature 1..21: note = HBV-targeting guide sequence portion
  source 1..21: mol_type = other RNA
gggggaactaccgtgtgtctt

SEQ ID NO: 10535 - RNA, 21 nt, synthetic construct
  misc_feature 1..21: note = HBV-targeting guide sequence portion
  source 1..21: mol_type = other RNA
gggggaggagattagattaat

SEQ ID NO: 10536 - RNA, 21 nt, synthetic construct
  misc_feature 1..21: note = HBV-targeting guide sequence portion
  source 1..21: mol_type = other RNA
gggggccaagtctgtacagca

SEQ ID NO: 10537 - RNA, 21 nt, synthetic construct
  misc_feature 1..21: note = HBV-targeting guide sequence portion
  source 1..21: mol_type = other RNA
gggggttgcatcagcaaacac

SEQ ID NO: 10538 - RNA, 21 nt, synthetic construct
  misc_feature 1..21: note = HBV-targeting guide sequence portion
  source 1..21: mol_type = other RNA
ggggtaaaggttcaggtattg

SEQ ID NO: 10539 - RNA, 21 nt, synthetic construct
  misc_feature 1..21: note = HBV-targeting guide sequence portion
  source 1..21: mol_type = other RNA
ggggtaggctgccgtcctgac

SEQ ID NO: 10540 - RNA, 21 nt, synthetic construct
  misc_feature 1..21: note = HBV-targeting guide sequence portion
  source 1..21: mol_type = other RNA
ggggtcctaggaatcctgatg

SEQ ID NO: 10541 - RNA, 21 nt, synthetic construct
  misc_feature 1..21: note = HBV-targeting guide sequence portion
  source 1..21: mol_type = other RNA
ggggtgaaccctagcccgaat

SEQ ID NO: 10542 - RNA, 21 nt, synthetic construct
  misc_feature 1..21: note = HBV-targeting guide sequence portion
  source 1..21: mol_type = other RNA
ggggtggagccctcaggctca

SEQ ID NO: 10543 - RNA, 21 nt, synthetic construct
  misc_feature 1..21: note = HBV-targeting guide sequence portion
  source 1..21: mol_type = other RNA
ggggttattctcttaatttca

SEQ ID NO: 10544 - RNA, 21 nt, synthetic construct
  misc_feature 1..21: note = HBV-targeting guide sequence portion
  source 1..21: mol_type = other RNA
ggggttgcatcagcaaacact

SEQ ID NO: 10545 - RNA, 21 nt, synthetic construct
  misc_feature 1..21: note = HBV-targeting guide sequence portion
  source 1..21: mol_type = other RNA
ggggttttccttgttgacaag

SEQ ID NO: 10546 - RNA, 21 nt, synthetic construct
  misc_feature 1..21: note = HBV-targeting guide sequence portion
  source 1..21: mol_type = other RNA
gggtaaaggttcaggtattgt

SEQ ID NO: 10547 - RNA, 21 nt, synthetic construct
  misc_feature 1..21: note = HBV-targeting guide sequence portion
  source 1..21: mol_type = other RNA
gggtactaatttagaagatca

SEQ ID NO: 10548 - RNA, 21 nt, synthetic construct
  misc_feature 1..21: note = HBV-targeting guide sequence portion
  source 1..21: mol_type = other RNA
gggtaggctgccgtcctgact

SEQ ID NO: 10549 - RNA, 21 nt, synthetic construct
  misc_feature 1..21: note = HBV-targeting guide sequence portion
  source 1..21: mol_type = other RNA
gggtattaaaccttattatcc

SEQ ID NO: 10550 - RNA, 21 nt, synthetic construct
  misc_feature 1..21: note = HBV-targeting guide sequence portion
  source 1..21: mol_type = other RNA
gggtcaatgtccatgccctaa

SEQ ID NO: 10551 - RNA, 21 nt, synthetic construct
  misc_feature 1..21: note = HBV-targeting guide sequence portion
  source 1..21: mol_type = other RNA
gggtcaccatattcttgggaa

SEQ ID NO: 10552 - RNA, 21 nt, synthetic construct
  misc_feature 1..21: note = HBV-targeting guide sequence portion
  source 1..21: mol_type = other RNA
gggtccaactggtggtcggga

SEQ ID NO: 10553 - RNA, 21 nt, synthetic construct
  misc_feature 1..21: note = HBV-targeting guide sequence portion
  source 1..21: mol_type = other RNA
gggtccccaatcctcgagaag

SEQ ID NO: 10554 - RNA, 21 nt, synthetic construct
  misc_feature 1..21: note = HBV-targeting guide sequence portion
  source 1..21: mol_type = other RNA
gggtcccgtgctggtggttga

SEQ ID NO: 10555 - RNA, 21 nt, synthetic construct
  misc_feature 1..21: note = HBV-targeting guide sequence portion
  source 1..21: mol_type = other RNA
gggtcctaggaatcctgatgt

SEQ ID NO: 10556 - RNA, 21 nt, synthetic construct
  misc_feature 1..21: note = HBV-targeting guide sequence portion
  source 1..21: mol_type = other RNA
gggtcgtccgcgggattcagc

SEQ ID NO: 10557 - RNA, 21 nt, synthetic construct
  misc_feature 1..21: note = HBV-targeting guide sequence portion
  source 1..21: mol_type = other RNA
gggtcttctgggttttgctgc

SEQ ID NO: 10558 - RNA, 21 nt, synthetic construct
  misc_feature 1..21: note = HBV-targeting guide sequence portion
  source 1..21: mol_type = other RNA
gggtgaaccctagcccgaatg

SEQ ID NO: 10559 - RNA, 21 nt, synthetic construct
  misc_feature 1..21: note = HBV-targeting guide sequence portion
  source 1..21: mol_type = other RNA
gggtggagccctcaggctcag

SEQ ID NO: 10560 - RNA, 21 nt, synthetic construct
  misc_feature 1..21: note = HBV-targeting guide sequence portion
  source 1..21: mol_type = other RNA
gggtggctttagggcatggac

SEQ ID NO: 10561 - RNA, 21 nt, synthetic construct
  misc_feature 1..21: note = HBV-targeting guide sequence portion
  source 1..21: mol_type = other RNA
gggtgggtactaatttagaag

SEQ ID NO: 10562 - RNA, 21 nt, synthetic construct
  misc_feature 1..21: note = HBV-targeting guide sequence portion
  source 1..21: mol_type = other RNA
gggtgtacatttaaaccctaa

SEQ ID NO: 10563 - RNA, 21 nt, synthetic construct
  misc_feature 1..21: note = HBV-targeting guide sequence portion
  source 1..21: mol_type = other RNA
gggtgttttatataagagagt

SEQ ID NO: 10564 - RNA, 21 nt, synthetic construct
  misc_feature 1..21: note = HBV-targeting guide sequence portion
  source 1..21: mol_type = other RNA
gggtgttttccaatgagggtt

SEQ ID NO: 10565 - RNA, 21 nt, synthetic construct
  misc_feature 1..21: note = HBV-targeting guide sequence portion
  source 1..21: mol_type = other RNA
gggttaaagacaggtacagta

SEQ ID NO: 10566 - RNA, 21 nt, synthetic construct
  misc_feature 1..21: note = HBV-targeting guide sequence portion
  source 1..21: mol_type = other RNA
gggttattctcttaatttcat

SEQ ID NO: 10567 - RNA, 21 nt, synthetic construct
  misc_feature 1..21: note = HBV-targeting guide sequence portion
  source 1..21: mol_type = other RNA
gggttcaccccaccgcacgga

SEQ ID NO: 10568 - RNA, 21 nt, synthetic construct
  misc_feature 1..21: note = HBV-targeting guide sequence portion
  source 1..21: mol_type = other RNA
gggttgcatcagcaaacactt

SEQ ID NO: 10569 - RNA, 21 nt, synthetic construct
  misc_feature 1..21: note = HBV-targeting guide sequence portion
  source 1..21: mol_type = other RNA
gggtttaaatgtacacccaaa

SEQ ID NO: 10570 - RNA, 21 nt, synthetic construct
  misc_feature 1..21: note = HBV-targeting guide sequence portion
  source 1..21: mol_type = other RNA
gggtttactgttcctgaactg

SEQ ID NO: 10571 - RNA, 21 nt, synthetic construct
  misc_feature 1..21: note = HBV-targeting guide sequence portion
  source 1..21: mol_type = other RNA
gggttttccttgttgacaaga

SEQ ID NO: 10572 - RNA, 21 nt, synthetic construct
  misc_feature 1..21: note = HBV-targeting guide sequence portion
  source 1..21: mol_type = other RNA
gggttttgctgccccttttac

SEQ ID NO: 10573 - RNA, 21 nt, synthetic construct
  misc_feature 1..21: note = HBV-targeting guide sequence portion
  source 1..21: mol_type = other RNA
ggtaaaggttcaggtattgtt

SEQ ID NO: 10574 - RNA, 21 nt, synthetic construct
  misc_feature 1..21: note = HBV-targeting guide sequence portion
  source 1..21: mol_type = other RNA
ggtaacagcggtataaaggga

SEQ ID NO: 10575 - RNA, 21 nt, synthetic construct
  misc_feature 1..21: note = HBV-targeting guide sequence portion
  source 1..21: mol_type = other RNA
ggtacagtagaagaataaagc

SEQ ID NO: 10576 - RNA, 21 nt, synthetic construct
  misc_feature 1..21: note = HBV-targeting guide sequence portion
  source 1..21: mol_type = other RNA
ggtactaatttagaagatcaa

SEQ ID NO: 10577 - RNA, 21 nt, synthetic construct
  misc_feature 1..21: note = HBV-targeting guide sequence portion
  source 1..21: mol_type = other RNA
ggtagaggcaggaggcggatt

SEQ ID NO: 10578 - RNA, 21 nt, synthetic construct
  misc_feature 1..21: note = HBV-targeting guide sequence portion
  source 1..21: mol_type = other RNA
ggtagctagagtcattagttc

SEQ ID NO: 10579 - RNA, 21 nt, synthetic construct
  misc_feature 1..21: note = HBV-targeting guide sequence portion
  source 1..21: mol_type = other RNA
ggtaggagctggagcattcgg

SEQ ID NO: 10580 - RNA, 21 nt, synthetic construct
  misc_feature 1..21: note = HBV-targeting guide sequence portion
  source 1..21: mol_type = other RNA
ggtaggctgccgtcctgactg

SEQ ID NO: 10581 - RNA, 21 nt, synthetic construct
  misc_feature 1..21: note = HBV-targeting guide sequence portion
  source 1..21: mol_type = other RNA
ggtagttccccctagaaaatt

SEQ ID NO: 10582 - RNA, 21 nt, synthetic construct
  misc_feature 1..21: note = HBV-targeting guide sequence portion
  source 1..21: mol_type = other RNA
ggtataaagggactcaagatg

SEQ ID NO: 10583 - RNA, 21 nt, synthetic construct
  misc_feature 1..21: note = HBV-targeting guide sequence portion
  source 1..21: mol_type = other RNA
ggtatctagaagatctcgtac

SEQ ID NO: 10584 - RNA, 21 nt, synthetic construct
  misc_feature 1..21: note = HBV-targeting guide sequence portion
  source 1..21: mol_type = other RNA
ggtatgtttcccgtctgtcct

SEQ ID NO: 10585 - RNA, 21 nt, synthetic construct
  misc_feature 1..21: note = HBV-targeting guide sequence portion
  source 1..21: mol_type = other RNA
ggtattaaaccttattatcca

SEQ ID NO: 10586 - RNA, 21 nt, synthetic construct
  misc_feature 1..21: note = HBV-targeting guide sequence portion
  source 1..21: mol_type = other RNA
ggtattgggggccaagtctgt

SEQ ID NO: 10587 - RNA, 21 nt, synthetic construct
  misc_feature 1..21: note = HBV-targeting guide sequence portion
  source 1..21: mol_type = other RNA
ggtattgtgaggattcttgtc

SEQ ID NO: 10588 - RNA, 21 nt, synthetic construct
  misc_feature 1..21: note = HBV-targeting guide sequence portion
  source 1..21: mol_type = other RNA
ggtattgtttacacagaaagg

SEQ ID NO: 10589 - RNA, 21 nt, synthetic construct
  misc_feature 1..21: note = HBV-targeting guide sequence portion
  source 1..21: mol_type = other RNA
ggtcaatgtccatgccctaaa

SEQ ID NO: 10590 - RNA, 21 nt, synthetic construct
  misc_feature 1..21: note = HBV-targeting guide sequence portion
  source 1..21: mol_type = other RNA
ggtcaccatattcttgggaac

SEQ ID NO: 10591 - RNA, 21 nt, synthetic construct
  misc_feature 1..21: note = HBV-targeting guide sequence portion
  source 1..21: mol_type = other RNA
ggtcataggccatcagcgcat

SEQ ID NO: 10592 - RNA, 21 nt, synthetic construct
  misc_feature 1..21: note = HBV-targeting guide sequence portion
  source 1..21: mol_type = other RNA
ggtccaactggtggtcgggaa

SEQ ID NO: 10593 - RNA, 21 nt, synthetic construct
  misc_feature 1..21: note = HBV-targeting guide sequence portion
  source 1..21: mol_type = other RNA
ggtccccaatcctcgagaaga

SEQ ID NO: 10594 - RNA, 21 nt, synthetic construct
  misc_feature 1..21: note = HBV-targeting guide sequence portion
  source 1..21: mol_type = other RNA
ggtcccctagaagaagaactc

SEQ ID NO: 10595 - RNA, 21 nt, synthetic construct
  misc_feature 1..21: note = HBV-targeting guide sequence portion
  source 1..21: mol_type = other RNA
ggtcccgtgctggtggttgat

SEQ ID NO: 10596 - RNA, 21 nt, synthetic construct
  misc_feature 1..21: note = HBV-targeting guide sequence portion
  source 1..21: mol_type = other RNA
ggtccctagatgcttgatctt

SEQ ID NO: 10597 - RNA, 21 nt, synthetic construct
  misc_feature 1..21: note = HBV-targeting guide sequence portion
  source 1..21: mol_type = other RNA
ggtccggcagatgagaaggca

SEQ ID NO: 10598 - RNA, 21 nt, synthetic construct
  misc_feature 1..21: note = HBV-targeting guide sequence portion
  source 1..21: mol_type = other RNA
ggtcctagagtatttggtgtc

SEQ ID NO: 10599 - RNA, 21 nt, synthetic construct
  misc_feature 1..21: note = HBV-targeting guide sequence portion
  source 1..21: mol_type = other RNA
ggtcctaggaatcctgatgtg

SEQ ID NO: 10600 - RNA, 21 nt, synthetic construct
  misc_feature 1..21: note = HBV-targeting guide sequence portion
  source 1..21: mol_type = other RNA
ggtcggaacggcaggcagaga

SEQ ID NO: 10601 - RNA, 21 nt, synthetic construct
  misc_feature 1..21: note = HBV-targeting guide sequence portion
  source 1..21: mol_type = other RNA
ggtcgggaaagaatcccagag

SEQ ID NO: 10602 - RNA, 21 nt, synthetic construct
  misc_feature 1..21: note = HBV-targeting guide sequence portion
  source 1..21: mol_type = other RNA
ggtcggtcggaacggcaggca

SEQ ID NO: 10603 - RNA, 21 nt, synthetic construct
  misc_feature 1..21: note = HBV-targeting guide sequence portion
  source 1..21: mol_type = other RNA
ggtcggtcgttgacattgcag

SEQ ID NO: 10604 - RNA, 21 nt, synthetic construct
  misc_feature 1..21: note = HBV-targeting guide sequence portion
  source 1..21: mol_type = other RNA
ggtcgtccgcgggattcagcg

SEQ ID NO: 10605 - RNA, 21 nt, synthetic construct
  misc_feature 1..21: note = HBV-targeting guide sequence portion
  source 1..21: mol_type = other RNA
ggtcgttgacattgcagagag

SEQ ID NO: 10606 - RNA, 21 nt, synthetic construct
  misc_feature 1..21: note = HBV-targeting guide sequence portion
  source 1..21: mol_type = other RNA
ggtctataagctggaggagtg

SEQ ID NO: 10607 - RNA, 21 nt, synthetic construct
  misc_feature 1..21: note = HBV-targeting guide sequence portion
  source 1..21: mol_type = other RNA
ggtctccatgcgacgtgcaga

SEQ ID NO: 10608 - RNA, 21 nt, synthetic construct
  misc_feature 1..21: note = HBV-targeting guide sequence portion
  source 1..21: mol_type = other RNA
ggtctgcgcaccagcaccatg

SEQ ID NO: 10609 - RNA, 21 nt, synthetic construct
  misc_feature 1..21: note = HBV-targeting guide sequence portion
  source 1..21: mol_type = other RNA
ggtctggagcaaacattctcg

SEQ ID NO: 10610 - RNA, 21 nt, synthetic construct
  misc_feature 1..21: note = HBV-targeting guide sequence portion
  source 1..21: mol_type = other RNA
ggtctgtgccaagtgtttgct

SEQ ID NO: 10611 - RNA, 21 nt, synthetic construct
  misc_feature 1..21: note = HBV-targeting guide sequence portion
  source 1..21: mol_type = other RNA
ggtcttacataagaggactct

SEQ ID NO: 10612 - RNA, 21 nt, synthetic construct
  misc_feature 1..21: note = HBV-targeting guide sequence portion
  source 1..21: mol_type = other RNA
ggtcttctgggttttgctgcc

SEQ ID NO: 10613 - RNA, 21 nt, synthetic construct
  misc_feature 1..21: note = HBV-targeting guide sequence portion
  source 1..21: mol_type = other RNA
ggtgaaaaagttgcatggtgc

SEQ ID NO: 10614 - RNA, 21 nt, synthetic construct
  misc_feature 1..21: note = HBV-targeting guide sequence portion
  source 1..21: mol_type = other RNA
ggtgaacaatgctcaggagac

SEQ ID NO: 10615 - RNA, 21 nt, synthetic construct
  misc_feature 1..21: note = HBV-targeting guide sequence portion
  source 1..21: mol_type = other RNA
ggtgaaccctagcccgaatgc

SEQ ID NO: 10616 - RNA, 21 nt, synthetic construct
  misc_feature 1..21: note = HBV-targeting guide sequence portion
  source 1..21: mol_type = other RNA
ggtgaagcgaagtgcacacgg

SEQ ID NO: 10617 - RNA, 21 nt, synthetic construct
  misc_feature 1..21: note = HBV-targeting guide sequence portion
  source 1..21: mol_type = other RNA
ggtgaatttaggataaaacct

SEQ ID NO: 10618 - RNA, 21 nt, synthetic construct
  misc_feature 1..21: note = HBV-targeting guide sequence portion
  source 1..21: mol_type = other RNA
ggtgacccacagaatgaggcg

SEQ ID NO: 10619 - RNA, 21 nt, synthetic construct
  misc_feature 1..21: note = HBV-targeting guide sequence portion
  source 1..21: mol_type = other RNA
ggtgaggtgaacaatgctcag

SEQ ID NO: 10620 - RNA, 21 nt, synthetic construct
  misc_feature 1..21: note = HBV-targeting guide sequence portion
  source 1..21: mol_type = other RNA
ggtgagtgattggaggttggg

SEQ ID NO: 10621 - RNA, 21 nt, synthetic construct
  misc_feature 1..21: note = HBV-targeting guide sequence portion
  source 1..21: mol_type = other RNA
ggtgcagtttccatccgaagg

SEQ ID NO: 10622 - RNA, 21 nt, synthetic construct
  misc_feature 1..21: note = HBV-targeting guide sequence portion
  source 1..21: mol_type = other RNA
ggtgcgcagaccaatttatgc

SEQ ID NO: 10623 - RNA, 21 nt, synthetic construct
  misc_feature 1..21: note = HBV-targeting guide sequence portion
  source 1..21: mol_type = other RNA
ggtgcgccccgtggtcggtcg

SEQ ID NO: 10624 - RNA, 21 nt, synthetic construct
  misc_feature 1..21: note = HBV-targeting guide sequence portion
  source 1..21: mol_type = other RNA
ggtgctggtgcgcagaccaat

SEQ ID NO: 10625 - RNA, 21 nt, synthetic construct
  misc_feature 1..21: note = HBV-targeting guide sequence portion
  source 1..21: mol_type = other RNA
ggtggaaagattctgccccat

SEQ ID NO: 10626 - RNA, 21 nt, synthetic construct
  misc_feature 1..21: note = HBV-targeting guide sequence portion
  source 1..21: mol_type = other RNA
ggtggacttctctcaattttc

SEQ ID NO: 10627 - RNA, 21 nt, synthetic construct
  misc_feature 1..21: note = HBV-targeting guide sequence portion
  source 1..21: mol_type = other RNA
ggtggagacagcggggtaggc

SEQ ID NO: 10628 - RNA, 21 nt, synthetic construct
  misc_feature 1..21: note = HBV-targeting guide sequence portion
  source 1..21: mol_type = other RNA
ggtggagccctcaggctcagg

SEQ ID NO: 10629 - RNA, 21 nt, synthetic construct
  misc_feature 1..21: note = HBV-targeting guide sequence portion
  source 1..21: mol_type = other RNA
ggtggctccagttcaggaaca

SEQ ID NO: 10630 - RNA, 21 nt, synthetic construct
  misc_feature 1..21: note = HBV-targeting guide sequence portion
  source 1..21: mol_type = other RNA
ggtggctttagggcatggaca

SEQ ID NO: 10631 - RNA, 21 nt, synthetic construct
  misc_feature 1..21: note = HBV-targeting guide sequence portion
  source 1..21: mol_type = other RNA
ggtgggaaattttacggggct

SEQ ID NO: 10632 - RNA, 21 nt, synthetic construct
  misc_feature 1..21: note = HBV-targeting guide sequence portion
  source 1..21: mol_type = other RNA
ggtgggcgttcacggtggtct

SEQ ID NO: 10633 - RNA, 21 nt, synthetic construct
  misc_feature 1..21: note = HBV-targeting guide sequence portion
  source 1..21: mol_type = other RNA
ggtggggtgaaccctagcccg

SEQ ID NO: 10634 - RNA, 21 nt, synthetic construct
  misc_feature 1..21: note = HBV-targeting guide sequence portion
  source 1..21: mol_type = other RNA
ggtgggtactaatttagaaga

SEQ ID NO: 10635 - RNA, 21 nt, synthetic construct
  misc_feature 1..21: note = HBV-targeting guide sequence portion
  source 1..21: mol_type = other RNA
ggtggtcgggaaagaatccca

SEQ ID NO: 10636 - RNA, 21 nt, synthetic construct
  misc_feature 1..21: note = HBV-targeting guide sequence portion
  source 1..21: mol_type = other RNA
ggtggtctataagctggagga

SEQ ID NO: 10637 - RNA, 21 nt, synthetic construct
  misc_feature 1..21: note = HBV-targeting guide sequence portion
  source 1..21: mol_type = other RNA
ggtggtctccatgcgacgtgc

SEQ ID NO: 10638 - RNA, 21 nt, synthetic construct
  misc_feature 1..21: note = HBV-targeting guide sequence portion
  source 1..21: mol_type = other RNA
ggtggttgatgatcctggaat

SEQ ID NO: 10639 - RNA, 21 nt, synthetic construct
  misc_feature 1..21: note = HBV-targeting guide sequence portion
  source 1..21: mol_type = other RNA
ggtgtacatttaaaccctaac

SEQ ID NO: 10640 - RNA, 21 nt, synthetic construct
  misc_feature 1..21: note = HBV-targeting guide sequence portion
  source 1..21: mol_type = other RNA
ggtgtagatgtatattaggaa

SEQ ID NO: 10641 - RNA, 21 nt, synthetic construct
  misc_feature 1..21: note = HBV-targeting guide sequence portion
  source 1..21: mol_type = other RNA
ggtgtcttttggagtgtggat

SEQ ID NO: 10642 - RNA, 21 nt, synthetic construct
  misc_feature 1..21: note = HBV-targeting guide sequence portion
  source 1..21: mol_type = other RNA
ggtgttttatataagagagtg

SEQ ID NO: 10643 - RNA, 21 nt, synthetic construct
  misc_feature 1..21: note = HBV-targeting guide sequence portion
  source 1..21: mol_type = other RNA
ggtgttttccaatgagggtta

SEQ ID NO: 10644 - RNA, 21 nt, synthetic construct
  misc_feature 1..21: note = HBV-targeting guide sequence portion
  source 1..21: mol_type = other RNA
ggttaaagacaggtacagtag

SEQ ID NO: 10645 - RNA, 21 nt, synthetic construct
  misc_feature 1..21: note = HBV-targeting guide sequence portion
  source 1..21: mol_type = other RNA
ggttaacaggcctattgattg

SEQ ID NO: 10646 - RNA, 21 nt, synthetic construct
  misc_feature 1..21: note = HBV-targeting guide sequence portion
  source 1..21: mol_type = other RNA
ggttatcctgctttaatgccc

SEQ ID NO: 10647 - RNA, 21 nt, synthetic construct
  misc_feature 1..21: note = HBV-targeting guide sequence portion
  source 1..21: mol_type = other RNA
ggttatcgctggatgtgtctg

SEQ ID NO: 10648 - RNA, 21 nt, synthetic construct
  misc_feature 1..21: note = HBV-targeting guide sequence portion
  source 1..21: mol_type = other RNA
ggttattctcttaatttcatg

SEQ ID NO: 10649 - RNA, 21 nt, synthetic construct
  misc_feature 1..21: note = HBV-targeting guide sequence portion
  source 1..21: mol_type = other RNA
ggttcaccccaccgcacggag

SEQ ID NO: 10650 - RNA, 21 nt, synthetic construct
  misc_feature 1..21: note = HBV-targeting guide sequence portion
  source 1..21: mol_type = other RNA
ggttcaggtattgtttacaca

SEQ ID NO: 10651 - RNA, 21 nt, synthetic construct
  misc_feature 1..21: note = HBV-targeting guide sequence portion
  source 1..21: mol_type = other RNA
ggttccacgcatgcgctgatg

SEQ ID NO: 10652 - RNA, 21 nt, synthetic construct
  misc_feature 1..21: note = HBV-targeting guide sequence portion
  source 1..21: mol_type = other RNA
ggttccttgagcaggagtcgt

SEQ ID NO: 10653 - RNA, 21 nt, synthetic construct
  misc_feature 1..21: note = HBV-targeting guide sequence portion
  source 1..21: mol_type = other RNA
ggttcgtagggctttccccca

SEQ ID NO: 10654 - RNA, 21 nt, synthetic construct
  misc_feature 1..21: note = HBV-targeting guide sequence portion
  source 1..21: mol_type = other RNA
ggttctgcagggtcccgtgct

SEQ ID NO: 10655 - RNA, 21 nt, synthetic construct
  misc_feature 1..21: note = HBV-targeting guide sequence portion
  source 1..21: mol_type = other RNA
ggttcttctggactatcaagg

SEQ ID NO: 10656 - RNA, 21 nt, synthetic construct
  misc_feature 1..21: note = HBV-targeting guide sequence portion
  source 1..21: mol_type = other RNA
ggttgaaattgattatgcctg

SEQ ID NO: 10657 - RNA, 21 nt, synthetic construct
  misc_feature 1..21: note = HBV-targeting guide sequence portion
  source 1..21: mol_type = other RNA
ggttgatgatcctggaattag

SEQ ID NO: 10658 - RNA, 21 nt, synthetic construct
  misc_feature 1..21: note = HBV-targeting guide sequence portion
  source 1..21: mol_type = other RNA
ggttgcatcagcaaacacttg

SEQ ID NO: 10659 - RNA, 21 nt, synthetic construct
  misc_feature 1..21: note = HBV-targeting guide sequence portion
  source 1..21: mol_type = other RNA
ggttggggactgcgaattttg

SEQ ID NO: 10660 - RNA, 21 nt, synthetic construct
  misc_feature 1..21: note = HBV-targeting guide sequence portion
  source 1..21: mol_type = other RNA
ggttggggcttggtcataggc

SEQ ID NO: 10661 - RNA, 21 nt, synthetic construct
  misc_feature 1..21: note = HBV-targeting guide sequence portion
  source 1..21: mol_type = other RNA
ggttggtgagtgattggaggt

SEQ ID NO: 10662 - RNA, 21 nt, synthetic construct
  misc_feature 1..21: note = HBV-targeting guide sequence portion
  source 1..21: mol_type = other RNA
ggtttaaatgtacacccaaag

SEQ ID NO: 10663 - RNA, 21 nt, synthetic construct
  misc_feature 1..21: note = HBV-targeting guide sequence portion
  source 1..21: mol_type = other RNA
ggtttaatacccttatccaag

SEQ ID NO: 10664 - RNA, 21 nt, synthetic construct
  misc_feature 1..21: note = HBV-targeting guide sequence portion
  source 1..21: mol_type = other RNA
ggtttactgttcctgaactgg

SEQ ID NO: 10665 - RNA, 21 nt, synthetic construct
  misc_feature 1..21: note = HBV-targeting guide sequence portion
  source 1..21: mol_type = other RNA
ggtttcacatttcttgtctta

SEQ ID NO: 10666 - RNA, 21 nt, synthetic construct
  misc_feature 1..21: note = HBV-targeting guide sequence portion
  source 1..21: mol_type = other RNA
ggtttgcattatgccctgagc

SEQ ID NO: 10667 - RNA, 21 nt, synthetic construct
  misc_feature 1..21: note = HBV-targeting guide sequence portion
  source 1..21: mol_type = other RNA
ggttttatcctaaattcacca

SEQ ID NO: 10668 - RNA, 21 nt, synthetic construct
  misc_feature 1..21: note = HBV-targeting guide sequence portion
  source 1..21: mol_type = other RNA
ggttttccttgttgacaagaa

SEQ ID NO: 10669 - RNA, 21 nt, synthetic construct
  misc_feature 1..21: note = HBV-targeting guide sequence portion
  source 1..21: mol_type = other RNA
ggttttgctgccccttttaca

SEQ ID NO: 10670 - RNA, 21 nt, synthetic construct
  misc_feature 1..21: note = HBV-targeting guide sequence portion
  source 1..21: mol_type = other RNA
ggttttgtacagcaacaggag

SEQ ID NO: 10671 - RNA, 21 nt, synthetic construct
  misc_feature 1..21: note = HBV-targeting guide sequence portion
  source 1..21: mol_type = other RNA
gtaaaaggggcagcaaaaccc

SEQ ID NO: 10672 - RNA, 21 nt, synthetic construct
  misc_feature 1..21: note = HBV-targeting guide sequence portion
  source 1..21: mol_type = other RNA
gtaaaatttcccaccttatga

SEQ ID NO: 10673 - RNA, 21 nt, synthetic construct
  misc_feature 1..21: note = HBV-targeting guide sequence portion
  source 1..21: mol_type = other RNA
gtaaacaaaggacgtcccgcg

SEQ ID NO: 10674 - RNA, 21 nt, synthetic construct
  misc_feature 1..21: note = HBV-targeting guide sequence portion
  source 1..21: mol_type = other RNA
gtaaacaatacctgaaccttt

SEQ ID NO: 10675 - RNA, 21 nt, synthetic construct
  misc_feature 1..21: note = HBV-targeting guide sequence portion
  source 1..21: mol_type = other RNA
gtaaaccctgttccgactact

SEQ ID NO: 10676 - RNA, 21 nt, synthetic construct
  misc_feature 1..21: note = HBV-targeting guide sequence portion
  source 1..21: mol_type = other RNA
gtaaactgagccaagagaaac

SEQ ID NO: 10677 - RNA, 21 nt, synthetic construct
  misc_feature 1..21: note = HBV-targeting guide sequence portion
  source 1..21: mol_type = other RNA
gtaaagagaggtgcgccccgt

SEQ ID NO: 10678 - RNA, 21 nt, synthetic construct
  misc_feature 1..21: note = HBV-targeting guide sequence portion
  source 1..21: mol_type = other RNA
gtaaaggttcaggtattgttt

SEQ ID NO: 10679 - RNA, 21 nt, synthetic construct
  misc_feature 1..21: note = HBV-targeting guide sequence portion
  source 1..21: mol_type = other RNA
gtaaatagtgtctagtttgga

SEQ ID NO: 10680 - RNA, 21 nt, synthetic construct
  misc_feature 1..21: note = HBV-targeting guide sequence portion
  source 1..21: mol_type = other RNA
gtaacacgagcaggggtccta

SEQ ID NO: 10681 - RNA, 21 nt, synthetic construct
  misc_feature 1..21: note = HBV-targeting guide sequence portion
  source 1..21: mol_type = other RNA
gtaacagcggtataaagggac

SEQ ID NO: 10682 - RNA, 21 nt, synthetic construct
  misc_feature 1..21: note = HBV-targeting guide sequence portion
  source 1..21: mol_type = other RNA
gtaactccacagtagctccaa

SEQ ID NO: 10683 - RNA, 21 nt, synthetic construct
  misc_feature 1..21: note = HBV-targeting guide sequence portion
  source 1..21: mol_type = other RNA
gtaagacaagaaatgtgaaac

SEQ ID NO: 10684 - RNA, 21 nt, synthetic construct
  misc_feature 1..21: note = HBV-targeting guide sequence portion
  source 1..21: mol_type = other RNA
gtaagaccttgggcaagaatt

SEQ ID NO: 10685 - RNA, 21 nt, synthetic construct
  misc_feature 1..21: note = HBV-targeting guide sequence portion
  source 1..21: mol_type = other RNA
gtaagcgggcctacaaactgt

SEQ ID NO: 10686 - RNA, 21 nt, synthetic construct
  misc_feature 1..21: note = HBV-targeting guide sequence portion
  source 1..21: mol_type = other RNA
gtaagttggcgaaaaagtgaa

SEQ ID NO: 10687 - RNA, 21 nt, synthetic construct
  misc_feature 1..21: note = HBV-targeting guide sequence portion
  source 1..21: mol_type = other RNA
gtaatgattaactagatgttc

SEQ ID NO: 10688 - RNA, 21 nt, synthetic construct
  misc_feature 1..21: note = HBV-targeting guide sequence portion
  source 1..21: mol_type = other RNA
gtacaaaaccttcggatggaa

SEQ ID NO: 10689 - RNA, 21 nt, synthetic construct
  misc_feature 1..21: note = HBV-targeting guide sequence portion
  source 1..21: mol_type = other RNA
gtacaaagatcattaatctaa

SEQ ID NO: 10690 - RNA, 21 nt, synthetic construct
  misc_feature 1..21: note = HBV-targeting guide sequence portion
  source 1..21: mol_type = other RNA
gtacacccaaagacaaaagaa

SEQ ID NO: 10691 - RNA, 21 nt, synthetic construct
  misc_feature 1..21: note = HBV-targeting guide sequence portion
  source 1..21: mol_type = other RNA
gtacagacttggcccccaata

SEQ ID NO: 10692 - RNA, 21 nt, synthetic construct
  misc_feature 1..21: note = HBV-targeting guide sequence portion
  source 1..21: mol_type = other RNA
gtacagcaacaggagggatac

SEQ ID NO: 10693 - RNA, 21 nt, synthetic construct
  misc_feature 1..21: note = HBV-targeting guide sequence portion
  source 1..21: mol_type = other RNA
gtacagcatcttgagtccctt

SEQ ID NO: 10694 - RNA, 21 nt, synthetic construct
  misc_feature 1..21: note = HBV-targeting guide sequence portion
  source 1..21: mol_type = other RNA
gtacagtagaagaataaagcc

SEQ ID NO: 10695 - RNA, 21 nt, synthetic construct
  misc_feature 1..21: note = HBV-targeting guide sequence portion
  source 1..21: mol_type = other RNA
gtacatttaaaccctaacaaa

SEQ ID NO: 10696 - RNA, 21 nt, synthetic construct
  misc_feature 1..21: note = HBV-targeting guide sequence portion
  source 1..21: mol_type = other RNA
gtacccacccaggtagctaga

SEQ ID NO: 10697 - RNA, 21 nt, synthetic construct
  misc_feature 1..21: note = HBV-targeting guide sequence portion
  source 1..21: mol_type = other RNA
gtacctgtctttaaccctcat

SEQ ID NO: 10698 - RNA, 21 nt, synthetic construct
  misc_feature 1..21: note = HBV-targeting guide sequence portion
  source 1..21: mol_type = other RNA
gtacgagatcttctagatacc

SEQ ID NO: 10699 - RNA, 21 nt, synthetic construct
  misc_feature 1..21: note = HBV-targeting guide sequence portion
  source 1..21: mol_type = other RNA
gtacggaaggaaagaagtcag

SEQ ID NO: 10700 - RNA, 21 nt, synthetic construct
  misc_feature 1..21: note = HBV-targeting guide sequence portion
  source 1..21: mol_type = other RNA
gtactaatttagaagatcaag

SEQ ID NO: 10701 - RNA, 21 nt, synthetic construct
  misc_feature 1..21: note = HBV-targeting guide sequence portion
  source 1..21: mol_type = other RNA
gtactaggaggctgtaggcat

SEQ ID NO: 10702 - RNA, 21 nt, synthetic construct
  misc_feature 1..21: note = HBV-targeting guide sequence portion
  source 1..21: mol_type = other RNA
gtagaagaataaagccccgta

SEQ ID NO: 10703 - RNA, 21 nt, synthetic construct
  misc_feature 1..21: note = HBV-targeting guide sequence portion
  source 1..21: mol_type = other RNA
gtagaggcaggaggcggattt

SEQ ID NO: 10704 - RNA, 21 nt, synthetic construct
  misc_feature 1..21: note = HBV-targeting guide sequence portion
  source 1..21: mol_type = other RNA
gtagatgtatattaggaaaag

SEQ ID NO: 10705 - RNA, 21 nt, synthetic construct
  misc_feature 1..21: note = HBV-targeting guide sequence portion
  source 1..21: mol_type = other RNA
gtagctagagtcattagttct

SEQ ID NO: 10706 - RNA, 21 nt, synthetic construct
  misc_feature 1..21: note = HBV-targeting guide sequence portion
  source 1..21: mol_type = other RNA
gtagctccaaattctttatat

SEQ ID NO: 10707 - RNA, 21 nt, synthetic construct
  misc_feature 1..21: note = HBV-targeting guide sequence portion
  source 1..21: mol_type = other RNA
gtagctcttgttcccaagaat

SEQ ID NO: 10708 - RNA, 21 nt, synthetic construct
  misc_feature 1..21: note = HBV-targeting guide sequence portion
  source 1..21: mol_type = other RNA
gtaggacatgaacaagagatg

SEQ ID NO: 10709 - RNA, 21 nt, synthetic construct
  misc_feature 1..21: note = HBV-targeting guide sequence portion
  source 1..21: mol_type = other RNA
gtaggagctggagcattcggg

SEQ ID NO: 10710 - RNA, 21 nt, synthetic construct
  misc_feature 1..21: note = HBV-targeting guide sequence portion
  source 1..21: mol_type = other RNA
gtaggcataaattggtctgcg

SEQ ID NO: 10711 - RNA, 21 nt, synthetic construct
  misc_feature 1..21: note = HBV-targeting guide sequence portion
  source 1..21: mol_type = other RNA
gtaggcccgcttacagttaat

SEQ ID NO: 10712 - RNA, 21 nt, synthetic construct
  misc_feature 1..21: note = HBV-targeting guide sequence portion
  source 1..21: mol_type = other RNA
gtaggctgccgtcctgactgg

SEQ ID NO: 10713 - RNA, 21 nt, synthetic construct
  misc_feature 1..21: note = HBV-targeting guide sequence portion
  source 1..21: mol_type = other RNA
gtagggctttcccccactgtt

SEQ ID NO: 10714 - RNA, 21 nt, synthetic construct
  misc_feature 1..21: note = HBV-targeting guide sequence portion
  source 1..21: mol_type = other RNA
gtagtcagttatgtcaacact

SEQ ID NO: 10715 - RNA, 21 nt, synthetic construct
  misc_feature 1..21: note = HBV-targeting guide sequence portion
  source 1..21: mol_type = other RNA
gtagtcggaacagggtttact

SEQ ID NO: 10716 - RNA, 21 nt, synthetic construct
  misc_feature 1..21: note = HBV-targeting guide sequence portion
  source 1..21: mol_type = other RNA
gtagttccccctagaaaattg

SEQ ID NO: 10717 - RNA, 21 nt, synthetic construct
  misc_feature 1..21: note = HBV-targeting guide sequence portion
  source 1..21: mol_type = other RNA
gtataaagggactcaagatgc

SEQ ID NO: 10718 - RNA, 21 nt, synthetic construct
  misc_feature 1..21: note = HBV-targeting guide sequence portion
  source 1..21: mol_type = other RNA
gtatattaggaaaagagggtg

SEQ ID NO: 10719 - RNA, 21 nt, synthetic construct
  misc_feature 1..21: note = HBV-targeting guide sequence portion
  source 1..21: mol_type = other RNA
gtatatttgcgggagaggaca

SEQ ID NO: 10720 - RNA, 21 nt, synthetic construct
  misc_feature 1..21: note = HBV-targeting guide sequence portion
  source 1..21: mol_type = other RNA
gtatccctcctgttgctgtac

SEQ ID NO: 10721 - RNA, 21 nt, synthetic construct
  misc_feature 1..21: note = HBV-targeting guide sequence portion
  source 1..21: mol_type = other RNA
gtatcccttggactcataagg

SEQ ID NO: 10722 - RNA, 21 nt, synthetic construct
  misc_feature 1..21: note = HBV-targeting guide sequence portion
  source 1..21: mol_type = other RNA
gtatcgggatgccttggagtc

SEQ ID NO: 10723 - RNA, 21 nt, synthetic construct
  misc_feature 1..21: note = HBV-targeting guide sequence portion
  source 1..21: mol_type = other RNA
gtatctagaagatctcgtacg

SEQ ID NO: 10724 - RNA, 21 nt, synthetic construct
  misc_feature 1..21: note = HBV-targeting guide sequence portion
  source 1..21: mol_type = other RNA
gtatctccctgctggtggctc

SEQ ID NO: 10725 - RNA, 21 nt, synthetic construct
  misc_feature 1..21: note = HBV-targeting guide sequence portion
  source 1..21: mol_type = other RNA
gtatgatgtgattttgtggca

SEQ ID NO: 10726 - RNA, 21 nt, synthetic construct
  misc_feature 1..21: note = HBV-targeting guide sequence portion
  source 1..21: mol_type = other RNA
gtatgcatgtattcaatctaa

SEQ ID NO: 10727 - RNA, 21 nt, synthetic construct
  misc_feature 1..21: note = HBV-targeting guide sequence portion
  source 1..21: mol_type = other RNA
gtatgcctcaaggtcggtcgt

SEQ ID NO: 10728 - RNA, 21 nt, synthetic construct
  misc_feature 1..21: note = HBV-targeting guide sequence portion
  source 1..21: mol_type = other RNA
gtatggatcggcagaggagcc

SEQ ID NO: 10729 - RNA, 21 nt, synthetic construct
  misc_feature 1..21: note = HBV-targeting guide sequence portion
  source 1..21: mol_type = other RNA
gtatggtgaggtgaacaatgc

SEQ ID NO: 10730 - RNA, 21 nt, synthetic construct
  misc_feature 1..21: note = HBV-targeting guide sequence portion
  source 1..21: mol_type = other RNA
gtatgtttcccgtctgtcctc

SEQ ID NO: 10731 - RNA, 21 nt, synthetic construct
  misc_feature 1..21: note = HBV-targeting guide sequence portion
  source 1..21: mol_type = other RNA
gtattaaaccttattatccag

SEQ ID NO: 10732 - RNA, 21 nt, synthetic construct
  misc_feature 1..21: note = HBV-targeting guide sequence portion
  source 1..21: mol_type = other RNA
gtattcaatctaagcaggctt

SEQ ID NO: 10733 - RNA, 21 nt, synthetic construct
  misc_feature 1..21: note = HBV-targeting guide sequence portion
  source 1..21: mol_type = other RNA
gtattcccatcccatcatcct

SEQ ID NO: 10734 - RNA, 21 nt, synthetic construct
  misc_feature 1..21: note = HBV-targeting guide sequence portion
  source 1..21: mol_type = other RNA
gtattgggggccaagtctgta

SEQ ID NO: 10735 - RNA, 21 nt, synthetic construct
  misc_feature 1..21: note = HBV-targeting guide sequence portion
  source 1..21: mol_type = other RNA
gtattgtgaggattcttgtca

SEQ ID NO: 10736 - RNA, 21 nt, synthetic construct
  misc_feature 1..21: note = HBV-targeting guide sequence portion
  source 1..21: mol_type = other RNA
gtattgtttacacagaaaggc

SEQ ID NO: 10737 - RNA, 21 nt, synthetic construct
  misc_feature 1..21: note = HBV-targeting guide sequence portion
  source 1..21: mol_type = other RNA
gtatttggtgaatttaggata

SEQ ID NO: 10738 - RNA, 21 nt, synthetic construct
  misc_feature 1..21: note = HBV-targeting guide sequence portion
  source 1..21: mol_type = other RNA
gtatttggtgtcttttggagt

SEQ ID NO: 10739 - RNA, 21 nt, synthetic construct
  misc_feature 1..21: note = HBV-targeting guide sequence portion
  source 1..21: mol_type = other RNA
gtcaacaaggaaaaccccgcc

SEQ ID NO: 10740 - RNA, 21 nt, synthetic construct
  misc_feature 1..21: note = HBV-targeting guide sequence portion
  source 1..21: mol_type = other RNA
gtcaacacatagcgcctcatt

SEQ ID NO: 10741 - RNA, 21 nt, synthetic construct
  misc_feature 1..21: note = HBV-targeting guide sequence portion
  source 1..21: mol_type = other RNA
gtcaacactcatatgggccta

SEQ ID NO: 10742 - RNA, 21 nt, synthetic construct
  misc_feature 1..21: note = HBV-targeting guide sequence portion
  source 1..21: mol_type = other RNA
gtcaacgaattgtgggtcttc

SEQ ID NO: 10743 - RNA, 21 nt, synthetic construct
  misc_feature 1..21: note = HBV-targeting guide sequence portion
  source 1..21: mol_type = other RNA
gtcaacgaccgaccttgaggc

SEQ ID NO: 10744 - RNA, 21 nt, synthetic construct
  misc_feature 1..21: note = HBV-targeting guide sequence portion
  source 1..21: mol_type = other RNA
gtcaatcttctcgaggattgg

SEQ ID NO: 10745 - RNA, 21 nt, synthetic construct
  misc_feature 1..21: note = HBV-targeting guide sequence portion
  source 1..21: mol_type = other RNA
gtcaatgtccatgccctaaag

SEQ ID NO: 10746 - RNA, 21 nt, synthetic construct
  misc_feature 1..21: note = HBV-targeting guide sequence portion
  source 1..21: mol_type = other RNA
gtcaccatattcttgggaaca

SEQ ID NO: 10747 - RNA, 21 nt, synthetic construct
  misc_feature 1..21: note = HBV-targeting guide sequence portion
  source 1..21: mol_type = other RNA
gtcagaaggcaaaaacgagag

SEQ ID NO: 10748 - RNA, 21 nt, synthetic construct
  misc_feature 1..21: note = HBV-targeting guide sequence portion
  source 1..21: mol_type = other RNA
gtcaggacggcagcctacccc

SEQ ID NO: 10749 - RNA, 21 nt, synthetic construct
  misc_feature 1..21: note = HBV-targeting guide sequence portion
  source 1..21: mol_type = other RNA
gtcagtcccgagaatgtttgc

SEQ ID NO: 10750 - RNA, 21 nt, synthetic construct
  misc_feature 1..21: note = HBV-targeting guide sequence portion
  source 1..21: mol_type = other RNA
gtcagttatgtcaacactcat

SEQ ID NO: 10751 - RNA, 21 nt, synthetic construct
  misc_feature 1..21: note = HBV-targeting guide sequence portion
  source 1..21: mol_type = other RNA
gtcataggccatcagcgcatg

SEQ ID NO: 10752 - RNA, 21 nt, synthetic construct
  misc_feature 1..21: note = HBV-targeting guide sequence portion
  source 1..21: mol_type = other RNA
gtcattagttctccccagcaa

SEQ ID NO: 10753 - RNA, 21 nt, synthetic construct
  misc_feature 1..21: note = HBV-targeting guide sequence portion
  source 1..21: mol_type = other RNA
gtcattgattgttggggatca

SEQ ID NO: 10754 - RNA, 21 nt, synthetic construct
  misc_feature 1..21: note = HBV-targeting guide sequence portion
  source 1..21: mol_type = other RNA
gtccaactggtggtcgggaaa

SEQ ID NO: 10755 - RNA, 21 nt, synthetic construct
  misc_feature 1..21: note = HBV-targeting guide sequence portion
  source 1..21: mol_type = other RNA
gtccaagagtcctcttatgta

SEQ ID NO: 10756 - RNA, 21 nt, synthetic construct
  misc_feature 1..21: note = HBV-targeting guide sequence portion
  source 1..21: mol_type = other RNA
gtccaagggatactaacattg

SEQ ID NO: 10757 - RNA, 21 nt, synthetic construct
  misc_feature 1..21: note = HBV-targeting guide sequence portion
  source 1..21: mol_type = other RNA
gtccaccacgagtctagactc

SEQ ID NO: 10758 - RNA, 21 nt, synthetic construct
  misc_feature 1..21: note = HBV-targeting guide sequence portion
  source 1..21: mol_type = other RNA
gtccagaagaaccaacaagaa

SEQ ID NO: 10759 - RNA, 21 nt, synthetic construct
  misc_feature 1..21: note = HBV-targeting guide sequence portion
  source 1..21: mol_type = other RNA
gtccatgccctaaagccaccc

SEQ ID NO: 10760 - RNA, 21 nt, synthetic construct
  misc_feature 1..21: note = HBV-targeting guide sequence portion
  source 1..21: mol_type = other RNA
gtcccaatctggattgttgga

SEQ ID NO: 10761 - RNA, 21 nt, synthetic construct
  misc_feature 1..21: note = HBV-targeting guide sequence portion
  source 1..21: mol_type = other RNA
gtccccaacctccaatcactc

SEQ ID NO: 10762 - RNA, 21 nt, synthetic construct
  misc_feature 1..21: note = HBV-targeting guide sequence portion
  source 1..21: mol_type = other RNA
gtccccaatcctcgagaagat

SEQ ID NO: 10763 - RNA, 21 nt, synthetic construct
  misc_feature 1..21: note = HBV-targeting guide sequence portion
  source 1..21: mol_type = other RNA
gtcccctagaagaagaactcc

SEQ ID NO: 10764 - RNA, 21 nt, synthetic construct
  misc_feature 1..21: note = HBV-targeting guide sequence portion
  source 1..21: mol_type = other RNA
gtcccgagaatgtttgctcca

SEQ ID NO: 10765 - RNA, 21 nt, synthetic construct
  misc_feature 1..21: note = HBV-targeting guide sequence portion
  source 1..21: mol_type = other RNA
gtcccgcgcaggatccagttg

SEQ ID NO: 10766 - RNA, 21 nt, synthetic construct
  misc_feature 1..21: note = HBV-targeting guide sequence portion
  source 1..21: mol_type = other RNA
gtcccgtcggcgctgaatccc

SEQ ID NO: 10767 - RNA, 21 nt, synthetic construct
  misc_feature 1..21: note = HBV-targeting guide sequence portion
  source 1..21: mol_type = other RNA
gtcccgtgctggtggttgatg

SEQ ID NO: 10768 - RNA, 21 nt, synthetic construct
  misc_feature 1..21: note = HBV-targeting guide sequence portion
  source 1..21: mol_type = other RNA
gtccctagatgcttgatcttc

SEQ ID NO: 10769 - RNA, 21 nt, synthetic construct
  misc_feature 1..21: note = HBV-targeting guide sequence portion
  source 1..21: mol_type = other RNA
gtccctttataccgctgttac

SEQ ID NO: 10770 - RNA, 21 nt, synthetic construct
  misc_feature 1..21: note = HBV-targeting guide sequence portion
  source 1..21: mol_type = other RNA
gtccgcgggattcagcgccga

SEQ ID NO: 10771 - RNA, 21 nt, synthetic construct
  misc_feature 1..21: note = HBV-targeting guide sequence portion
  source 1..21: mol_type = other RNA
gtccgcgtaaagagaggtgcg

SEQ ID NO: 10772 - RNA, 21 nt, synthetic construct
  misc_feature 1..21: note = HBV-targeting guide sequence portion
  source 1..21: mol_type = other RNA
gtccggcagatgagaaggcac

SEQ ID NO: 10773 - RNA, 21 nt, synthetic construct
  misc_feature 1..21: note = HBV-targeting guide sequence portion
  source 1..21: mol_type = other RNA
gtcctactgttcaagcctcca

SEQ ID NO: 10774 - RNA, 21 nt, synthetic construct
  misc_feature 1..21: note = HBV-targeting guide sequence portion
  source 1..21: mol_type = other RNA
gtcctagagtatttggtgtct

SEQ ID NO: 10775 - RNA, 21 nt, synthetic construct
  misc_feature 1..21: note = HBV-targeting guide sequence portion
  source 1..21: mol_type = other RNA
gtcctaggaatcctgatgtga

SEQ ID NO: 10776 - RNA, 21 nt, synthetic construct
  misc_feature 1..21: note = HBV-targeting guide sequence portion
  source 1..21: mol_type = other RNA
gtcctccaacttgtcctggtt

SEQ ID NO: 10777 - RNA, 21 nt, synthetic construct
  misc_feature 1..21: note = HBV-targeting guide sequence portion
  source 1..21: mol_type = other RNA
gtcctctaattccaggatcat

SEQ ID NO: 10778 - RNA, 21 nt, synthetic construct
  misc_feature 1..21: note = HBV-targeting guide sequence portion
  source 1..21: mol_type = other RNA
gtcctctcccgcaaatataca

SEQ ID NO: 10779 - RNA, 21 nt, synthetic construct
  misc_feature 1..21: note = HBV-targeting guide sequence portion
  source 1..21: mol_type = other RNA
gtcctcttatgtaagaccttg

SEQ ID NO: 10780 - RNA, 21 nt, synthetic construct
  misc_feature 1..21: note = HBV-targeting guide sequence portion
  source 1..21: mol_type = other RNA
gtcctcttctctgcctgccgt

SEQ ID NO: 10781 - RNA, 21 nt, synthetic construct
  misc_feature 1..21: note = HBV-targeting guide sequence portion
  source 1..21: mol_type = other RNA
gtcctgactggcgattggtag

SEQ ID NO: 10782 - RNA, 21 nt, synthetic construct
  misc_feature 1..21: note = HBV-targeting guide sequence portion
  source 1..21: mol_type = other RNA
gtcctggttatcgctggatgt

SEQ ID NO: 10783 - RNA, 21 nt, synthetic construct
  misc_feature 1..21: note = HBV-targeting guide sequence portion
  source 1..21: mol_type = other RNA
gtcctttgtttacgtcccgtc

SEQ ID NO: 10784 - RNA, 21 nt, synthetic construct
  misc_feature 1..21: note = HBV-targeting guide sequence portion
  source 1..21: mol_type = other RNA
gtcgcagaagatctcaatctc

SEQ ID NO: 10785 - RNA, 21 nt, synthetic construct
  misc_feature 1..21: note = HBV-targeting guide sequence portion
  source 1..21: mol_type = other RNA
gtcgcatggagaccaccgtga

SEQ ID NO: 10786 - RNA, 21 nt, synthetic construct
  misc_feature 1..21: note = HBV-targeting guide sequence portion
  source 1..21: mol_type = other RNA
gtcggaacagggtttactgtt

SEQ ID NO: 10787 - RNA, 21 nt, synthetic construct
  misc_feature 1..21: note = HBV-targeting guide sequence portion
  source 1..21: mol_type = other RNA
gtcggaacggcaggcagagaa

SEQ ID NO: 10788 - RNA, 21 nt, synthetic construct
  misc_feature 1..21: note = HBV-targeting guide sequence portion
  source 1..21: mol_type = other RNA
gtcggcgctgaatcccgcgga

SEQ ID NO: 10789 - RNA, 21 nt, synthetic construct
  misc_feature 1..21: note = HBV-targeting guide sequence portion
  source 1..21: mol_type = other RNA
gtcgggaaagaatcccagagg

SEQ ID NO: 10790 - RNA, 21 nt, synthetic construct
  misc_feature 1..21: note = HBV-targeting guide sequence portion
  source 1..21: mol_type = other RNA
gtcggtcggaacggcaggcag

SEQ ID NO: 10791 - RNA, 21 nt, synthetic construct
  misc_feature 1..21: note = HBV-targeting guide sequence portion
  source 1..21: mol_type = other RNA
gtcggtcgttgacattgcaga

SEQ ID NO: 10792 - RNA, 21 nt, synthetic construct
  misc_feature 1..21: note = HBV-targeting guide sequence portion
  source 1..21: mol_type = other RNA
gtcgtccgcgggattcagcgc

SEQ ID NO: 10793 - RNA, 21 nt, synthetic construct
  misc_feature 1..21: note = HBV-targeting guide sequence portion
  source 1..21: mol_type = other RNA
gtcgtcctcttctctgcctgc

SEQ ID NO: 10794 - RNA, 21 nt, synthetic construct
  misc_feature 1..21: note = HBV-targeting guide sequence portion
  source 1..21: mol_type = other RNA
gtcgtctaacaacacaagtct

SEQ ID NO: 10795 - RNA, 21 nt, synthetic construct
  misc_feature 1..21: note = HBV-targeting guide sequence portion
  source 1..21: mol_type = other RNA
gtcgtgcaggttctgcagggt

SEQ ID NO: 10796 - RNA, 21 nt, synthetic construct
  misc_feature 1..21: note = HBV-targeting guide sequence portion
  source 1..21: mol_type = other RNA
gtcgttgacattgcagagagt

SEQ ID NO: 10797 - RNA, 21 nt, synthetic construct
  misc_feature 1..21: note = HBV-targeting guide sequence portion
  source 1..21: mol_type = other RNA
gtctaacaacacaagtctccg

SEQ ID NO: 10798 - RNA, 21 nt, synthetic construct
  misc_feature 1..21: note = HBV-targeting guide sequence portion
  source 1..21: mol_type = other RNA
gtctagactcgtggtggactt

SEQ ID NO: 10799 - RNA, 21 nt, synthetic construct
  misc_feature 1..21: note = HBV-targeting guide sequence portion
  source 1..21: mol_type = other RNA
gtctagactctgcggtattgt

SEQ ID NO: 10800 - RNA, 21 nt, synthetic construct
  misc_feature 1..21: note = HBV-targeting guide sequence portion
  source 1..21: mol_type = other RNA
gtctagtttggaagtaatgat

SEQ ID NO: 10801 - RNA, 21 nt, synthetic construct
  misc_feature 1..21: note = HBV-targeting guide sequence portion
  source 1..21: mol_type = other RNA
gtctataagctggaggagtgc

SEQ ID NO: 10802 - RNA, 21 nt, synthetic construct
  misc_feature 1..21: note = HBV-targeting guide sequence portion
  source 1..21: mol_type = other RNA
gtctccacctctgagaaacac

SEQ ID NO: 10803 - RNA, 21 nt, synthetic construct
  misc_feature 1..21: note = HBV-targeting guide sequence portion
  source 1..21: mol_type = other RNA
gtctccatgcgacgtgcagag

SEQ ID NO: 10804 - RNA, 21 nt, synthetic construct
  misc_feature 1..21: note = HBV-targeting guide sequence portion
  source 1..21: mol_type = other RNA
gtctccggaagtgttgatagg

SEQ ID NO: 10805 - RNA, 21 nt, synthetic construct
  misc_feature 1..21: note = HBV-targeting guide sequence portion
  source 1..21: mol_type = other RNA
gtctcctgagcattgttcacc

SEQ ID NO: 10806 - RNA, 21 nt, synthetic construct
  misc_feature 1..21: note = HBV-targeting guide sequence portion
  source 1..21: mol_type = other RNA
gtctgaactttaggcccatat

SEQ ID NO: 10807 - RNA, 21 nt, synthetic construct
  misc_feature 1..21: note = HBV-targeting guide sequence portion
  source 1..21: mol_type = other RNA
gtctgcgaggcgagggagttc

SEQ ID NO: 10808 - RNA, 21 nt, synthetic construct
  misc_feature 1..21: note = HBV-targeting guide sequence portion
  source 1..21: mol_type = other RNA
gtctgcgcaccagcaccatgc

SEQ ID NO: 10809 - RNA, 21 nt, synthetic construct
  misc_feature 1..21: note = HBV-targeting guide sequence portion
  source 1..21: mol_type = other RNA
gtctgcggcgttttatcatct

SEQ ID NO: 10810 - RNA, 21 nt, synthetic construct
  misc_feature 1..21: note = HBV-targeting guide sequence portion
  source 1..21: mol_type = other RNA
gtctggagcaaacattctcgg

SEQ ID NO: 10811 - RNA, 21 nt, synthetic construct
  misc_feature 1..21: note = HBV-targeting guide sequence portion
  source 1..21: mol_type = other RNA
gtctggccagggatccttgtt

SEQ ID NO: 10812 - RNA, 21 nt, synthetic construct
  misc_feature 1..21: note = HBV-targeting guide sequence portion
  source 1..21: mol_type = other RNA
gtctgtacagcatcttgagtc

SEQ ID NO: 10813 - RNA, 21 nt, synthetic construct
  misc_feature 1..21: note = HBV-targeting guide sequence portion
  source 1..21: mol_type = other RNA
gtctgtcctctaattccagga

SEQ ID NO: 10814 - RNA, 21 nt, synthetic construct
  misc_feature 1..21: note = HBV-targeting guide sequence portion
  source 1..21: mol_type = other RNA
gtctgtgccaagtgtttgctg

SEQ ID NO: 10815 - RNA, 21 nt, synthetic construct
  misc_feature 1..21: note = HBV-targeting guide sequence portion
  source 1..21: mol_type = other RNA
gtctgtgccttctcatctgcc

SEQ ID NO: 10816 - RNA, 21 nt, synthetic construct
  misc_feature 1..21: note = HBV-targeting guide sequence portion
  source 1..21: mol_type = other RNA
gtcttacataagaggactctt

SEQ ID NO: 10817 - RNA, 21 nt, synthetic construct
  misc_feature 1..21: note = HBV-targeting guide sequence portion
  source 1..21: mol_type = other RNA
gtcttacttttggaagagaaa

SEQ ID NO: 10818 - RNA, 21 nt, synthetic construct
  misc_feature 1..21: note = HBV-targeting guide sequence portion
  source 1..21: mol_type = other RNA
gtcttctgggttttgctgccc

SEQ ID NO: 10819 - RNA, 21 nt, synthetic construct
  misc_feature 1..21: note = HBV-targeting guide sequence portion
  source 1..21: mol_type = other RNA
gtcttggccaaaattcgcagt

SEQ ID NO: 10820 - RNA, 21 nt, synthetic construct
  misc_feature 1..21: note = HBV-targeting guide sequence portion
  source 1..21: mol_type = other RNA
gtctttaaacaaacagtcttt

SEQ ID NO: 10821 - RNA, 21 nt, synthetic construct
  misc_feature 1..21: note = HBV-targeting guide sequence portion
  source 1..21: mol_type = other RNA
gtctttaaccctcattggaaa

SEQ ID NO: 10822 - RNA, 21 nt, synthetic construct
  misc_feature 1..21: note = HBV-targeting guide sequence portion
  source 1..21: mol_type = other RNA
gtctttgaagtatgcctcaag

SEQ ID NO: 10823 - RNA, 21 nt, synthetic construct
  misc_feature 1..21: note = HBV-targeting guide sequence portion
  source 1..21: mol_type = other RNA
gtctttgggtgtacatttaaa

SEQ ID NO: 10824 - RNA, 21 nt, synthetic construct
  misc_feature 1..21: note = HBV-targeting guide sequence portion
  source 1..21: mol_type = other RNA
gtcttttctcattaactgtaa

SEQ ID NO: 10825 - RNA, 21 nt, synthetic construct
  misc_feature 1..21: note = HBV-targeting guide sequence portion
  source 1..21: mol_type = other RNA
gtcttttggagtgtggattcg

SEQ ID NO: 10826 - RNA, 21 nt, synthetic construct
  misc_feature 1..21: note = HBV-targeting guide sequence portion
  source 1..21: mol_type = other RNA
gtgaaaaagttgcatggtgct

SEQ ID NO: 10827 - RNA, 21 nt, synthetic construct
  misc_feature 1..21: note = HBV-targeting guide sequence portion
  source 1..21: mol_type = other RNA
gtgaaaccacaatagttgtct

SEQ ID NO: 10828 - RNA, 21 nt, synthetic construct
  misc_feature 1..21: note = HBV-targeting guide sequence portion
  source 1..21: mol_type = other RNA
gtgaaagcctgcttagattga

SEQ ID NO: 10829 - RNA, 21 nt, synthetic construct
  misc_feature 1..21: note = HBV-targeting guide sequence portion
  source 1..21: mol_type = other RNA
gtgaacaatgctcaggagact

SEQ ID NO: 10830 - RNA, 21 nt, synthetic construct
  misc_feature 1..21: note = HBV-targeting guide sequence portion
  source 1..21: mol_type = other RNA
gtgaacagtttgtaggcccgc

SEQ ID NO: 10831 - RNA, 21 nt, synthetic construct
  misc_feature 1..21: note = HBV-targeting guide sequence portion
  source 1..21: mol_type = other RNA
gtgaaccctagcccgaatgct

SEQ ID NO: 10832 - RNA, 21 nt, synthetic construct
  misc_feature 1..21: note = HBV-targeting guide sequence portion
  source 1..21: mol_type = other RNA
gtgaacgcccaccaattcttg

SEQ ID NO: 10833 - RNA, 21 nt, synthetic construct
  misc_feature 1..21: note = HBV-targeting guide sequence portion
  source 1..21: mol_type = other RNA
gtgaagcgaagtgcacacggt

SEQ ID NO: 10834 - RNA, 21 nt, synthetic construct
  misc_feature 1..21: note = HBV-targeting guide sequence portion
  source 1..21: mol_type = other RNA
gtgaatttaggataaaaccta

SEQ ID NO: 10835 - RNA, 21 nt, synthetic construct
  misc_feature 1..21: note = HBV-targeting guide sequence portion
  source 1..21: mol_type = other RNA
gtgacccacagaatgaggcgc

SEQ ID NO: 10836 - RNA, 21 nt, synthetic construct
  misc_feature 1..21: note = HBV-targeting guide sequence portion
  source 1..21: mol_type = other RNA
gtgagaggcagtagtcggaac

SEQ ID NO: 10837 - RNA, 21 nt, synthetic construct
  misc_feature 1..21: note = HBV-targeting guide sequence portion
  source 1..21: mol_type = other RNA
gtgagaggcctgtatctccct

SEQ ID NO: 10838 - RNA, 21 nt, synthetic construct
  misc_feature 1..21: note = HBV-targeting guide sequence portion
  source 1..21: mol_type = other RNA
gtgaggattcttgtcaacaag

SEQ ID NO: 10839 - RNA, 21 nt, synthetic construct
  misc_feature 1..21: note = HBV-targeting guide sequence portion
  source 1..21: mol_type = other RNA
gtgaggtgaacaatgctcagg

SEQ ID NO: 10840 - RNA, 21 nt, synthetic construct
  misc_feature 1..21: note = HBV-targeting guide sequence portion
  source 1..21: mol_type = other RNA
gtgagtgattggaggttgggg

SEQ ID NO: 10841 - RNA, 21 nt, synthetic construct
  misc_feature 1..21: note = HBV-targeting guide sequence portion
  source 1..21: mol_type = other RNA
gtgatgttctccatgttcagc

SEQ ID NO: 10842 - RNA, 21 nt, synthetic construct
  misc_feature 1..21: note = HBV-targeting guide sequence portion
  source 1..21: mol_type = other RNA
gtgattggaggttggggactg

SEQ ID NO: 10843 - RNA, 21 nt, synthetic construct
  misc_feature 1..21: note = HBV-targeting guide sequence portion
  source 1..21: mol_type = other RNA
gtgattttgtggcaatgatcc

SEQ ID NO: 10844 - RNA, 21 nt, synthetic construct
  misc_feature 1..21: note = HBV-targeting guide sequence portion
  source 1..21: mol_type = other RNA
gtgcacacggtccggcagatg

SEQ ID NO: 10845 - RNA, 21 nt, synthetic construct
  misc_feature 1..21: note = HBV-targeting guide sequence portion
  source 1..21: mol_type = other RNA
gtgcacttcgcttcacctctg

SEQ ID NO: 10846 - RNA, 21 nt, synthetic construct
  misc_feature 1..21: note = HBV-targeting guide sequence portion
  source 1..21: mol_type = other RNA
gtgcagaggtgaagcgaagtg

SEQ ID NO: 10847 - RNA, 21 nt, synthetic construct
  misc_feature 1..21: note = HBV-targeting guide sequence portion
  source 1..21: mol_type = other RNA
gtgcaggttctgcagggtccc

SEQ ID NO: 10848 - RNA, 21 nt, synthetic construct
  misc_feature 1..21: note = HBV-targeting guide sequence portion
  source 1..21: mol_type = other RNA
gtgcagtatggtgaggtgaac

SEQ ID NO: 10849 - RNA, 21 nt, synthetic construct
  misc_feature 1..21: note = HBV-targeting guide sequence portion
  source 1..21: mol_type = other RNA
gtgcagtttccatccgaaggt

SEQ ID NO: 10850 - RNA, 21 nt, synthetic construct
  misc_feature 1..21: note = HBV-targeting guide sequence portion
  source 1..21: mol_type = other RNA
gtgccaagtgtttgctgatgc

SEQ ID NO: 10851 - RNA, 21 nt, synthetic construct
  misc_feature 1..21: note = HBV-targeting guide sequence portion
  source 1..21: mol_type = other RNA
gtgccatttgttcagtggttc

SEQ ID NO: 10852 - RNA, 21 nt, synthetic construct
  misc_feature 1..21: note = HBV-targeting guide sequence portion
  source 1..21: mol_type = other RNA
gtgccttctcatctgccggac

SEQ ID NO: 10853 - RNA, 21 nt, synthetic construct
  misc_feature 1..21: note = HBV-targeting guide sequence portion
  source 1..21: mol_type = other RNA
gtgccttgggtggctttaggg

SEQ ID NO: 10854 - RNA, 21 nt, synthetic construct
  misc_feature 1..21: note = HBV-targeting guide sequence portion
  source 1..21: mol_type = other RNA
gtgcgaatccacactccaaaa

SEQ ID NO: 10855 - RNA, 21 nt, synthetic construct
  misc_feature 1..21: note = HBV-targeting guide sequence portion
  source 1..21: mol_type = other RNA
gtgcgcagaccaatttatgcc

SEQ ID NO: 10856 - RNA, 21 nt, synthetic construct
  misc_feature 1..21: note = HBV-targeting guide sequence portion
  source 1..21: mol_type = other RNA
gtgcgccccgtggtcggtcgg

SEQ ID NO: 10857 - RNA, 21 nt, synthetic construct
  misc_feature 1..21: note = HBV-targeting guide sequence portion
  source 1..21: mol_type = other RNA
gtgcggtggggtgaaccctag

SEQ ID NO: 10858 - RNA, 21 nt, synthetic construct
  misc_feature 1..21: note = HBV-targeting guide sequence portion
  source 1..21: mol_type = other RNA
gtgctgccaactggatcctgc

SEQ ID NO: 10859 - RNA, 21 nt, synthetic construct
  misc_feature 1..21: note = HBV-targeting guide sequence portion
  source 1..21: mol_type = other RNA
gtgctggtgcgcagaccaatt

SEQ ID NO: 10860 - RNA, 21 nt, synthetic construct
  misc_feature 1..21: note = HBV-targeting guide sequence portion
  source 1..21: mol_type = other RNA
gtgctggtggttgatgatcct

SEQ ID NO: 10861 - RNA, 21 nt, synthetic construct
  misc_feature 1..21: note = HBV-targeting guide sequence portion
  source 1..21: mol_type = other RNA
gtggaaagattctgccccatg

SEQ ID NO: 10862 - RNA, 21 nt, synthetic construct
  misc_feature 1..21: note = HBV-targeting guide sequence portion
  source 1..21: mol_type = other RNA
gtggaacctttccggctcctc

SEQ ID NO: 10863 - RNA, 21 nt, synthetic construct
  misc_feature 1..21: note = HBV-targeting guide sequence portion
  source 1..21: mol_type = other RNA
gtggacttctctcaattttct

SEQ ID NO: 10864 - RNA, 21 nt, synthetic construct
  misc_feature 1..21: note = HBV-targeting guide sequence portion
  source 1..21: mol_type = other RNA
gtggagacagcggggtaggct

SEQ ID NO: 10865 - RNA, 21 nt, synthetic construct
  misc_feature 1..21: note = HBV-targeting guide sequence portion
  source 1..21: mol_type = other RNA
gtggagccctcaggctcaggg

SEQ ID NO: 10866 - RNA, 21 nt, synthetic construct
  misc_feature 1..21: note = HBV-targeting guide sequence portion
  source 1..21: mol_type = other RNA
gtggagttactctcgtttttg

SEQ ID NO: 10867 - RNA, 21 nt, synthetic construct
  misc_feature 1..21: note = HBV-targeting guide sequence portion
  source 1..21: mol_type = other RNA
gtggattcgcactcctccagc

SEQ ID NO: 10868 - RNA, 21 nt, synthetic construct
  misc_feature 1..21: note = HBV-targeting guide sequence portion
  source 1..21: mol_type = other RNA
gtggcaatgatccccaacaat

SEQ ID NO: 10869 - RNA, 21 nt, synthetic construct
  misc_feature 1..21: note = HBV-targeting guide sequence portion
  source 1..21: mol_type = other RNA
gtggctccagttcaggaacag

SEQ ID NO: 10870 - RNA, 21 nt, synthetic construct
  misc_feature 1..21: note = HBV-targeting guide sequence portion
  source 1..21: mol_type = other RNA
gtggctttagggcatggacat

SEQ ID NO: 10871 - RNA, 21 nt, synthetic construct
  misc_feature 1..21: note = HBV-targeting guide sequence portion
  source 1..21: mol_type = other RNA
gtgggaaattttacggggctt

SEQ ID NO: 10872 - RNA, 21 nt, synthetic construct
  misc_feature 1..21: note = HBV-targeting guide sequence portion
  source 1..21: mol_type = other RNA
gtgggcctcagcccgtttctc

SEQ ID NO: 10873 - RNA, 21 nt, synthetic construct
  misc_feature 1..21: note = HBV-targeting guide sequence portion
  source 1..21: mol_type = other RNA
gtgggcgttcacggtggtctc

SEQ ID NO: 10874 - RNA, 21 nt, synthetic construct
  misc_feature 1..21: note = HBV-targeting guide sequence portion
  source 1..21: mol_type = other RNA
gtgggggaaagccctacgaac

SEQ ID NO: 10875 - RNA, 21 nt, synthetic construct
  misc_feature 1..21: note = HBV-targeting guide sequence portion
  source 1..21: mol_type = other RNA
gtgggggttgcatcagcaaac

SEQ ID NO: 10876 - RNA, 21 nt, synthetic construct
  misc_feature 1..21: note = HBV-targeting guide sequence portion
  source 1..21: mol_type = other RNA
gtggggtgaaccctagcccga

SEQ ID NO: 10877 - RNA, 21 nt, synthetic construct
  misc_feature 1..21: note = HBV-targeting guide sequence portion
  source 1..21: mol_type = other RNA
gtgggtactaatttagaagat

SEQ ID NO: 10878 - RNA, 21 nt, synthetic construct
  misc_feature 1..21: note = HBV-targeting guide sequence portion
  source 1..21: mol_type = other RNA
gtgggtcaccatattcttggg

SEQ ID NO: 10879 - RNA, 21 nt, synthetic construct
  misc_feature 1..21: note = HBV-targeting guide sequence portion
  source 1..21: mol_type = other RNA
gtgggtcttctgggttttgct

SEQ ID NO: 10880 - RNA, 21 nt, synthetic construct
  misc_feature 1..21: note = HBV-targeting guide sequence portion
  source 1..21: mol_type = other RNA
gtggtattgggggccaagtct

SEQ ID NO: 10881 - RNA, 21 nt, synthetic construct
  misc_feature 1..21: note = HBV-targeting guide sequence portion
  source 1..21: mol_type = other RNA
gtggtcgggaaagaatcccag

SEQ ID NO: 10882 - RNA, 21 nt, synthetic construct
  misc_feature 1..21: note = HBV-targeting guide sequence portion
  source 1..21: mol_type = other RNA
gtggtcggtcggaacggcagg

SEQ ID NO: 10883 - RNA, 21 nt, synthetic construct
  misc_feature 1..21: note = HBV-targeting guide sequence portion
  source 1..21: mol_type = other RNA
gtggtctataagctggaggag

SEQ ID NO: 10884 - RNA, 21 nt, synthetic construct
  misc_feature 1..21: note = HBV-targeting guide sequence portion
  source 1..21: mol_type = other RNA
gtggtctccatgcgacgtgca

SEQ ID NO: 10885 - RNA, 21 nt, synthetic construct
  misc_feature 1..21: note = HBV-targeting guide sequence portion
  source 1..21: mol_type = other RNA
gtggtggacttctctcaattt

SEQ ID NO: 10886 - RNA, 21 nt, synthetic construct
  misc_feature 1..21: note = HBV-targeting guide sequence portion
  source 1..21: mol_type = other RNA
gtggttatcctgctttaatgc

SEQ ID NO: 10887 - RNA, 21 nt, synthetic construct
  misc_feature 1..21: note = HBV-targeting guide sequence portion
  source 1..21: mol_type = other RNA
gtggttcgtagggctttcccc

SEQ ID NO: 10888 - RNA, 21 nt, synthetic construct
  misc_feature 1..21: note = HBV-targeting guide sequence portion
  source 1..21: mol_type = other RNA
gtggttgatgatcctggaatt

SEQ ID NO: 10889 - RNA, 21 nt, synthetic construct
  misc_feature 1..21: note = HBV-targeting guide sequence portion
  source 1..21: mol_type = other RNA
gtggtttcacatttcttgtct

SEQ ID NO: 10890 - RNA, 21 nt, synthetic construct
  misc_feature 1..21: note = HBV-targeting guide sequence portion
  source 1..21: mol_type = other RNA
gtgtaaaaggggcagcaaaac

SEQ ID NO: 10891 - RNA, 21 nt, synthetic construct
  misc_feature 1..21: note = HBV-targeting guide sequence portion
  source 1..21: mol_type = other RNA
gtgtaaacaatacctgaacct

SEQ ID NO: 10892 - RNA, 21 nt, synthetic construct
  misc_feature 1..21: note = HBV-targeting guide sequence portion
  source 1..21: mol_type = other RNA
gtgtaaatagtgtctagtttg

SEQ ID NO: 10893 - RNA, 21 nt, synthetic construct
  misc_feature 1..21: note = HBV-targeting guide sequence portion
  source 1..21: mol_type = other RNA
gtgtacatttaaaccctaaca

SEQ ID NO: 10894 - RNA, 21 nt, synthetic construct
  misc_feature 1..21: note = HBV-targeting guide sequence portion
  source 1..21: mol_type = other RNA
gtgtagatgtatattaggaaa

SEQ ID NO: 10895 - RNA, 21 nt, synthetic construct
  misc_feature 1..21: note = HBV-targeting guide sequence portion
  source 1..21: mol_type = other RNA
gtgtatgatgtgattttgtgg

SEQ ID NO: 10896 - RNA, 21 nt, synthetic construct
  misc_feature 1..21: note = HBV-targeting guide sequence portion
  source 1..21: mol_type = other RNA
gtgtcaacacatagcgcctca

SEQ ID NO: 10897 - RNA, 21 nt, synthetic construct
  misc_feature 1..21: note = HBV-targeting guide sequence portion
  source 1..21: mol_type = other RNA
gtgtcaacgaattgtgggtct

SEQ ID NO: 10898 - RNA, 21 nt, synthetic construct
  misc_feature 1..21: note = HBV-targeting guide sequence portion
  source 1..21: mol_type = other RNA
gtgtctagtttggaagtaatg

SEQ ID NO: 10899 - RNA, 21 nt, synthetic construct
  misc_feature 1..21: note = HBV-targeting guide sequence portion
  source 1..21: mol_type = other RNA
gtgtctgcggcgttttatcat

SEQ ID NO: 10900 - RNA, 21 nt, synthetic construct
  misc_feature 1..21: note = HBV-targeting guide sequence portion
  source 1..21: mol_type = other RNA
gtgtcttggccaaaattcgca

SEQ ID NO: 10901 - RNA, 21 nt, synthetic construct
  misc_feature 1..21: note = HBV-targeting guide sequence portion
  source 1..21: mol_type = other RNA
gtgtcttttggagtgtggatt

SEQ ID NO: 10902 - RNA, 21 nt, synthetic construct
  misc_feature 1..21: note = HBV-targeting guide sequence portion
  source 1..21: mol_type = other RNA
gtgtgcacttcgcttcacctc

SEQ ID NO: 10903 - RNA, 21 nt, synthetic construct
  misc_feature 1..21: note = HBV-targeting guide sequence portion
  source 1..21: mol_type = other RNA
gtgtggattcgcactcctcca

SEQ ID NO: 10904 - RNA, 21 nt, synthetic construct
  misc_feature 1..21: note = HBV-targeting guide sequence portion
  source 1..21: mol_type = other RNA
gtgtgtaaatagtgtctagtt

SEQ ID NO: 10905 - RNA, 21 nt, synthetic construct
  misc_feature 1..21: note = HBV-targeting guide sequence portion
  source 1..21: mol_type = other RNA
gtgtgtcaacgaattgtgggt

SEQ ID NO: 10906 - RNA, 21 nt, synthetic construct
  misc_feature 1..21: note = HBV-targeting guide sequence portion
  source 1..21: mol_type = other RNA
gtgtgtcttggccaaaattcg

SEQ ID NO: 10907 - RNA, 21 nt, synthetic construct
  misc_feature 1..21: note = HBV-targeting guide sequence portion
  source 1..21: mol_type = other RNA
gtgttacaggcggggttttcc

SEQ ID NO: 10908 - RNA, 21 nt, synthetic construct
  misc_feature 1..21: note = HBV-targeting guide sequence portion
  source 1..21: mol_type = other RNA
gtgttgacactctcttatata

SEQ ID NO: 10909 - RNA, 21 nt, synthetic construct
  misc_feature 1..21: note = HBV-targeting guide sequence portion
  source 1..21: mol_type = other RNA
gtgttgacataactgactact

SEQ ID NO: 10910 - RNA, 21 nt, synthetic construct
  misc_feature 1..21: note = HBV-targeting guide sequence portion
  source 1..21: mol_type = other RNA
gtgttgataggataggggcat

SEQ ID NO: 10911 - RNA, 21 nt, synthetic construct
  misc_feature 1..21: note = HBV-targeting guide sequence portion
  source 1..21: mol_type = other RNA
gtgttgttagacgacgaggca

SEQ ID NO: 10912 - RNA, 21 nt, synthetic construct
  misc_feature 1..21: note = HBV-targeting guide sequence portion
  source 1..21: mol_type = other RNA
gtgtttctcagaggtggagac

SEQ ID NO: 10913 - RNA, 21 nt, synthetic construct
  misc_feature 1..21: note = HBV-targeting guide sequence portion
  source 1..21: mol_type = other RNA
gtgtttgctgatgcaaccccc

SEQ ID NO: 10914 - RNA, 21 nt, synthetic construct
  misc_feature 1..21: note = HBV-targeting guide sequence portion
  source 1..21: mol_type = other RNA
gtgttttatataagagagtgt

SEQ ID NO: 10915 - RNA, 21 nt, synthetic construct
  misc_feature 1..21: note = HBV-targeting guide sequence portion
  source 1..21: mol_type = other RNA
gtgttttccaatgagggttaa

SEQ ID NO: 10916 - RNA, 21 nt, synthetic construct
  misc_feature 1..21: note = HBV-targeting guide sequence portion
  source 1..21: mol_type = other RNA
gttaaagacaggtacagtaga

SEQ ID NO: 10917 - RNA, 21 nt, synthetic construct
  misc_feature 1..21: note = HBV-targeting guide sequence portion
  source 1..21: mol_type = other RNA
gttaacaggcctattgattgg

SEQ ID NO: 10918 - RNA, 21 nt, synthetic construct
  misc_feature 1..21: note = HBV-targeting guide sequence portion
  source 1..21: mol_type = other RNA
gttaaccgggagttttctgaa

SEQ ID NO: 10919 - RNA, 21 nt, synthetic construct
  misc_feature 1..21: note = HBV-targeting guide sequence portion
  source 1..21: mol_type = other RNA
gttaatcattacttccaaact

SEQ ID NO: 10920 - RNA, 21 nt, synthetic construct
  misc_feature 1..21: note = HBV-targeting guide sequence portion
  source 1..21: mol_type = other RNA
gttaatgagaaaagacggttg

SEQ ID NO: 10921 - RNA, 21 nt, synthetic construct
  misc_feature 1..21: note = HBV-targeting guide sequence portion
  source 1..21: mol_type = other RNA
gttacaggcggggttttcctt

SEQ ID NO: 10922 - RNA, 21 nt, synthetic construct
  misc_feature 1..21: note = HBV-targeting guide sequence portion
  source 1..21: mol_type = other RNA
gttaccaattttcttttgtct

SEQ ID NO: 10923 - RNA, 21 nt, synthetic construct
  misc_feature 1..21: note = HBV-targeting guide sequence portion
  source 1..21: mol_type = other RNA
gttactctcgtttttgccttc

SEQ ID NO: 10924 - RNA, 21 nt, synthetic construct
  misc_feature 1..21: note = HBV-targeting guide sequence portion
  source 1..21: mol_type = other RNA
gttagacgacgaggcaggtcc

SEQ ID NO: 10925 - RNA, 21 nt, synthetic construct
  misc_feature 1..21: note = HBV-targeting guide sequence portion
  source 1..21: mol_type = other RNA
gttagggtttaaatgtacacc

SEQ ID NO: 10926 - RNA, 21 nt, synthetic construct
  misc_feature 1..21: note = HBV-targeting guide sequence portion
  source 1..21: mol_type = other RNA
gttagtatcccttggactcat

SEQ ID NO: 10927 - RNA, 21 nt, synthetic construct
  misc_feature 1..21: note = HBV-targeting guide sequence portion
  source 1..21: mol_type = other RNA
gttatatggatgatgtggtat

SEQ ID NO: 10928 - RNA, 21 nt, synthetic construct
  misc_feature 1..21: note = HBV-targeting guide sequence portion
  source 1..21: mol_type = other RNA
gttatcctgctttaatgccct

SEQ ID NO: 10929 - RNA, 21 nt, synthetic construct
  misc_feature 1..21: note = HBV-targeting guide sequence portion
  source 1..21: mol_type = other RNA
gttatcgctggatgtgtctgc

SEQ ID NO: 10930 - RNA, 21 nt, synthetic construct
  misc_feature 1..21: note = HBV-targeting guide sequence portion
  source 1..21: mol_type = other RNA
gttatgtcaacactcatatgg

SEQ ID NO: 10931 - RNA, 21 nt, synthetic construct
  misc_feature 1..21: note = HBV-targeting guide sequence portion
  source 1..21: mol_type = other RNA
gttattctcttaatttcatgg

SEQ ID NO: 10932 - RNA, 21 nt, synthetic construct
  misc_feature 1..21: note = HBV-targeting guide sequence portion
  source 1..21: mol_type = other RNA
gttcaagcctccaagctgtgc

SEQ ID NO: 10933 - RNA, 21 nt, synthetic construct
  misc_feature 1..21: note = HBV-targeting guide sequence portion
  source 1..21: mol_type = other RNA
gttcacattttttgataatat

SEQ ID NO: 10934 - RNA, 21 nt, synthetic construct
  misc_feature 1..21: note = HBV-targeting guide sequence portion
  source 1..21: mol_type = other RNA
gttcaccccaccgcacggagg

SEQ ID NO: 10935 - RNA, 21 nt, synthetic construct
  misc_feature 1..21: note = HBV-targeting guide sequence portion
  source 1..21: mol_type = other RNA
gttcacctcaccatactgcac

SEQ ID NO: 10936 - RNA, 21 nt, synthetic construct
  misc_feature 1..21: note = HBV-targeting guide sequence portion
  source 1..21: mol_type = other RNA
gttcacggtggtctccatgcg

SEQ ID NO: 10937 - RNA, 21 nt, synthetic construct
  misc_feature 1..21: note = HBV-targeting guide sequence portion
  source 1..21: mol_type = other RNA
gttcagacaactattgtggtt

SEQ ID NO: 10938 - RNA, 21 nt, synthetic construct
  misc_feature 1..21: note = HBV-targeting guide sequence portion
  source 1..21: mol_type = other RNA
gttcagcgcagggtccccaat

SEQ ID NO: 10939 - RNA, 21 nt, synthetic construct
  misc_feature 1..21: note = HBV-targeting guide sequence portion
  source 1..21: mol_type = other RNA
gttcaggaacagtaaaccctg

SEQ ID NO: 10940 - RNA, 21 nt, synthetic construct
  misc_feature 1..21: note = HBV-targeting guide sequence portion
  source 1..21: mol_type = other RNA
gttcaggtattgtttacacag

SEQ ID NO: 10941 - RNA, 21 nt, synthetic construct
  misc_feature 1..21: note = HBV-targeting guide sequence portion
  source 1..21: mol_type = other RNA
gttcagtggttcgtagggctt

SEQ ID NO: 10942 - RNA, 21 nt, synthetic construct
  misc_feature 1..21: note = HBV-targeting guide sequence portion
  source 1..21: mol_type = other RNA
gttcatgtcctactgttcaag

SEQ ID NO: 10943 - RNA, 21 nt, synthetic construct
  misc_feature 1..21: note = HBV-targeting guide sequence portion
  source 1..21: mol_type = other RNA
gttccacgcatgcgctgatgg

SEQ ID NO: 10944 - RNA, 21 nt, synthetic construct
  misc_feature 1..21: note = HBV-targeting guide sequence portion
  source 1..21: mol_type = other RNA
gttcccaagaatatggtgacc

SEQ ID NO: 10945 - RNA, 21 nt, synthetic construct
  misc_feature 1..21: note = HBV-targeting guide sequence portion
  source 1..21: mol_type = other RNA
gttcccatggctgctaggctg

SEQ ID NO: 10946 - RNA, 21 nt, synthetic construct
  misc_feature 1..21: note = HBV-targeting guide sequence portion
  source 1..21: mol_type = other RNA
gttccccctagaaaattgaga

SEQ ID NO: 10947 - RNA, 21 nt, synthetic construct
  misc_feature 1..21: note = HBV-targeting guide sequence portion
  source 1..21: mol_type = other RNA
gttccgaccgaccacggggcg

SEQ ID NO: 10948 - RNA, 21 nt, synthetic construct
  misc_feature 1..21: note = HBV-targeting guide sequence portion
  source 1..21: mol_type = other RNA
gttccgactactgcctctcac

SEQ ID NO: 10949 - RNA, 21 nt, synthetic construct
  misc_feature 1..21: note = HBV-targeting guide sequence portion
  source 1..21: mol_type = other RNA
gttccgcagtatggatcggca

SEQ ID NO: 10950 - RNA, 21 nt, synthetic construct
  misc_feature 1..21: note = HBV-targeting guide sequence portion
  source 1..21: mol_type = other RNA
gttcctgaactggagccacca

SEQ ID NO: 10951 - RNA, 21 nt, synthetic construct
  misc_feature 1..21: note = HBV-targeting guide sequence portion
  source 1..21: mol_type = other RNA
gttccttgagcaggagtcgtg

SEQ ID NO: 10952 - RNA, 21 nt, synthetic construct
  misc_feature 1..21: note = HBV-targeting guide sequence portion
  source 1..21: mol_type = other RNA
gttcgtagggctttcccccac

SEQ ID NO: 10953 - RNA, 21 nt, synthetic construct
  misc_feature 1..21: note = HBV-targeting guide sequence portion
  source 1..21: mol_type = other RNA
gttctccatgttcagcgcagg

SEQ ID NO: 10954 - RNA, 21 nt, synthetic construct
  misc_feature 1..21: note = HBV-targeting guide sequence portion
  source 1..21: mol_type = other RNA
gttctccccagcaaagaattg

SEQ ID NO: 10955 - RNA, 21 nt, synthetic construct
  misc_feature 1..21: note = HBV-targeting guide sequence portion
  source 1..21: mol_type = other RNA
gttctgcagggtcccgtgctg

SEQ ID NO: 10956 - RNA, 21 nt, synthetic construct
  misc_feature 1..21: note = HBV-targeting guide sequence portion
  source 1..21: mol_type = other RNA
gttctggataataaggtttaa

SEQ ID NO: 10957 - RNA, 21 nt, synthetic construct
  misc_feature 1..21: note = HBV-targeting guide sequence portion
  source 1..21: mol_type = other RNA
gttcttctggactatcaaggt

SEQ ID NO: 10958 - RNA, 21 nt, synthetic construct
  misc_feature 1..21: note = HBV-targeting guide sequence portion
  source 1..21: mol_type = other RNA
gttcttcttctaggggacctg

SEQ ID NO: 10959 - RNA, 21 nt, synthetic construct
  misc_feature 1..21: note = HBV-targeting guide sequence portion
  source 1..21: mol_type = other RNA
gttgaaattgattatgcctgc

SEQ ID NO: 10960 - RNA, 21 nt, synthetic construct
  misc_feature 1..21: note = HBV-targeting guide sequence portion
  source 1..21: mol_type = other RNA
gttgacaagaatcctcacaat

SEQ ID NO: 10961 - RNA, 21 nt, synthetic construct
  misc_feature 1..21: note = HBV-targeting guide sequence portion
  source 1..21: mol_type = other RNA
gttgacacactttccaatcaa

SEQ ID NO: 10962 - RNA, 21 nt, synthetic construct
  misc_feature 1..21: note = HBV-targeting guide sequence portion
  source 1..21: mol_type = other RNA
gttgacactctcttatataaa

SEQ ID NO: 10963 - RNA, 21 nt, synthetic construct
  misc_feature 1..21: note = HBV-targeting guide sequence portion
  source 1..21: mol_type = other RNA
gttgacataactgactactag

SEQ ID NO: 10964 - RNA, 21 nt, synthetic construct
  misc_feature 1..21: note = HBV-targeting guide sequence portion
  source 1..21: mol_type = other RNA
gttgacattgcagagagtcca

SEQ ID NO: 10965 - RNA, 21 nt, synthetic construct
  misc_feature 1..21: note = HBV-targeting guide sequence portion
  source 1..21: mol_type = other RNA
gttgataggataggggcattt

SEQ ID NO: 10966 - RNA, 21 nt, synthetic construct
  misc_feature 1..21: note = HBV-targeting guide sequence portion
  source 1..21: mol_type = other RNA
gttgatgatcctggaattaga

SEQ ID NO: 10967 - RNA, 21 nt, synthetic construct
  misc_feature 1..21: note = HBV-targeting guide sequence portion
  source 1..21: mol_type = other RNA
gttgcatcagcaaacacttgg

SEQ ID NO: 10968 - RNA, 21 nt, synthetic construct
  misc_feature 1..21: note = HBV-targeting guide sequence portion
  source 1..21: mol_type = other RNA
gttgcatggtgctggtgcgca

SEQ ID NO: 10969 - RNA, 21 nt, synthetic construct
  misc_feature 1..21: note = HBV-targeting guide sequence portion
  source 1..21: mol_type = other RNA
gttgccaggcaacggccaggt

SEQ ID NO: 10970 - RNA, 21 nt, synthetic construct
  misc_feature 1..21: note = HBV-targeting guide sequence portion
  source 1..21: mol_type = other RNA
gttgcctggcaacggggtaaa

SEQ ID NO: 10971 - RNA, 21 nt, synthetic construct
  misc_feature 1..21: note = HBV-targeting guide sequence portion
  source 1..21: mol_type = other RNA
gttgctgtacaaaaccttcgg

SEQ ID NO: 10972 - RNA, 21 nt, synthetic construct
  misc_feature 1..21: note = HBV-targeting guide sequence portion
  source 1..21: mol_type = other RNA
gttggacccagccttcagagc

SEQ ID NO: 10973 - RNA, 21 nt, synthetic construct
  misc_feature 1..21: note = HBV-targeting guide sequence portion
  source 1..21: mol_type = other RNA
gttggaggacaggaggttggt

SEQ ID NO: 10974 - RNA, 21 nt, synthetic construct
  misc_feature 1..21: note = HBV-targeting guide sequence portion
  source 1..21: mol_type = other RNA
gttggagtttgctctgaaggc

SEQ ID NO: 10975 - RNA, 21 nt, synthetic construct
  misc_feature 1..21: note = HBV-targeting guide sequence portion
  source 1..21: mol_type = other RNA
gttggcagcacagcctagcag

SEQ ID NO: 10976 - RNA, 21 nt, synthetic construct
  misc_feature 1..21: note = HBV-targeting guide sequence portion
  source 1..21: mol_type = other RNA
gttggcgaaaaagtgaaagcc

SEQ ID NO: 10977 - RNA, 21 nt, synthetic construct
  misc_feature 1..21: note = HBV-targeting guide sequence portion
  source 1..21: mol_type = other RNA
gttggcgtctggccagggatc

SEQ ID NO: 10978 - RNA, 21 nt, synthetic construct
  misc_feature 1..21: note = HBV-targeting guide sequence portion
  source 1..21: mol_type = other RNA
gttgggattgaagtcccaatc

SEQ ID NO: 10979 - RNA, 21 nt, synthetic construct
  misc_feature 1..21: note = HBV-targeting guide sequence portion
  source 1..21: mol_type = other RNA
gttggggactgcgaattttgg

SEQ ID NO: 10980 - RNA, 21 nt, synthetic construct
  misc_feature 1..21: note = HBV-targeting guide sequence portion
  source 1..21: mol_type = other RNA
gttggggatcattgccacaaa

SEQ ID NO: 10981 - RNA, 21 nt, synthetic construct
  misc_feature 1..21: note = HBV-targeting guide sequence portion
  source 1..21: mol_type = other RNA
gttggggcttggtcataggcc

SEQ ID NO: 10982 - RNA, 21 nt, synthetic construct
  misc_feature 1..21: note = HBV-targeting guide sequence portion
  source 1..21: mol_type = other RNA
gttgggggaggagattagatt

SEQ ID NO: 10983 - RNA, 21 nt, synthetic construct
  misc_feature 1..21: note = HBV-targeting guide sequence portion
  source 1..21: mol_type = other RNA
gttggtgagtgattggaggtt

SEQ ID NO: 10984 - RNA, 21 nt, synthetic construct
  misc_feature 1..21: note = HBV-targeting guide sequence portion
  source 1..21: mol_type = other RNA
gttggttcttctggactatca

SEQ ID NO: 10985 - RNA, 21 nt, synthetic construct
  misc_feature 1..21: note = HBV-targeting guide sequence portion
  source 1..21: mol_type = other RNA
gttgtcagtcccgagaatgtt

SEQ ID NO: 10986 - RNA, 21 nt, synthetic construct
  misc_feature 1..21: note = HBV-targeting guide sequence portion
  source 1..21: mol_type = other RNA
gttgtcctctcccgcaaatat

SEQ ID NO: 10987 - RNA, 21 nt, synthetic construct
  misc_feature 1..21: note = HBV-targeting guide sequence portion
  source 1..21: mol_type = other RNA
gttgtctgaactttaggccca

SEQ ID NO: 10988 - RNA, 21 nt, synthetic construct
  misc_feature 1..21: note = HBV-targeting guide sequence portion
  source 1..21: mol_type = other RNA
gttgttagacgacgaggcagg

SEQ ID NO: 10989 - RNA, 21 nt, synthetic construct
  misc_feature 1..21: note = HBV-targeting guide sequence portion
  source 1..21: mol_type = other RNA
gtttaaagactgggaggagtt

SEQ ID NO: 10990 - RNA, 21 nt, synthetic construct
  misc_feature 1..21: note = HBV-targeting guide sequence portion
  source 1..21: mol_type = other RNA
gtttaaatgtacacccaaaga

SEQ ID NO: 10991 - RNA, 21 nt, synthetic construct
  misc_feature 1..21: note = HBV-targeting guide sequence portion
  source 1..21: mol_type = other RNA
gtttaatacccttatccaagg

SEQ ID NO: 10992 - RNA, 21 nt, synthetic construct
  misc_feature 1..21: note = HBV-targeting guide sequence portion
  source 1..21: mol_type = other RNA
gtttacacagaaaggccttgt

SEQ ID NO: 10993 - RNA, 21 nt, synthetic construct
  misc_feature 1..21: note = HBV-targeting guide sequence portion
  source 1..21: mol_type = other RNA
gtttacgtcccgtcggcgctg

SEQ ID NO: 10994 - RNA, 21 nt, synthetic construct
  misc_feature 1..21: note = HBV-targeting guide sequence portion
  source 1..21: mol_type = other RNA
gtttactagtgccatttgttc

SEQ ID NO: 10995 - RNA, 21 nt, synthetic construct
  misc_feature 1..21: note = HBV-targeting guide sequence portion
  source 1..21: mol_type = other RNA
gtttactgttcctgaactgga

SEQ ID NO: 10996 - RNA, 21 nt, synthetic construct
  misc_feature 1..21: note = HBV-targeting guide sequence portion
  source 1..21: mol_type = other RNA
gtttcacatttcttgtcttac

SEQ ID NO: 10997 - RNA, 21 nt, synthetic construct
  misc_feature 1..21: note = HBV-targeting guide sequence portion
  source 1..21: mol_type = other RNA
gtttcagaaaactcccggtta

SEQ ID NO: 10998 - RNA, 21 nt, synthetic construct
  misc_feature 1..21: note = HBV-targeting guide sequence portion
  source 1..21: mol_type = other RNA
gtttccatccgaaggttttgt

SEQ ID NO: 10999 - RNA, 21 nt, synthetic construct
  misc_feature 1..21: note = HBV-targeting guide sequence portion
  source 1..21: mol_type = other RNA
gtttcccgtctgtcctctaat

SEQ ID NO: 11000 - RNA, 21 nt, synthetic construct
  misc_feature 1..21: note = HBV-targeting guide sequence portion
  source 1..21: mol_type = other RNA
gtttctcagaggtggagacag

SEQ ID NO: 11001 - RNA, 21 nt, synthetic construct
  misc_feature 1..21: note = HBV-targeting guide sequence portion
  source 1..21: mol_type = other RNA
gtttctcttccaaaagtaaga

SEQ ID NO: 11002 - RNA, 21 nt, synthetic construct
  misc_feature 1..21: note = HBV-targeting guide sequence portion
  source 1..21: mol_type = other RNA
gtttctcttggctcagtttac

SEQ ID NO: 11003 - RNA, 21 nt, synthetic construct
  misc_feature 1..21: note = HBV-targeting guide sequence portion
  source 1..21: mol_type = other RNA
gtttgcattatgccctgagcc

SEQ ID NO: 11004 - RNA, 21 nt, synthetic construct
  misc_feature 1..21: note = HBV-targeting guide sequence portion
  source 1..21: mol_type = other RNA
gtttgctccagaccggctgcg

SEQ ID NO: 11005 - RNA, 21 nt, synthetic construct
  misc_feature 1..21: note = HBV-targeting guide sequence portion
  source 1..21: mol_type = other RNA
gtttgctctgaaggctgggtc

SEQ ID NO: 11006 - RNA, 21 nt, synthetic construct
  misc_feature 1..21: note = HBV-targeting guide sequence portion
  source 1..21: mol_type = other RNA
gtttgctgatgcaacccccac

SEQ ID NO: 11007 - RNA, 21 nt, synthetic construct
  misc_feature 1..21: note = HBV-targeting guide sequence portion
  source 1..21: mol_type = other RNA
gtttggaagtaatgattaact

SEQ ID NO: 11008 - RNA, 21 nt, synthetic construct
  misc_feature 1..21: note = HBV-targeting guide sequence portion
  source 1..21: mol_type = other RNA
gtttggctttcagttatatgg

SEQ ID NO: 11009 - RNA, 21 nt, synthetic construct
  misc_feature 1..21: note = HBV-targeting guide sequence portion
  source 1..21: mol_type = other RNA
gtttgtaggcccgcttacagt

SEQ ID NO: 11010 - RNA, 21 nt, synthetic construct
  misc_feature 1..21: note = HBV-targeting guide sequence portion
  source 1..21: mol_type = other RNA
gtttgtttaaagactgggagg

SEQ ID NO: 11011 - RNA, 21 nt, synthetic construct
  misc_feature 1..21: note = HBV-targeting guide sequence portion
  source 1..21: mol_type = other RNA
gttttatataagagagtgtca

SEQ ID NO: 11012 - RNA, 21 nt, synthetic construct
  misc_feature 1..21: note = HBV-targeting guide sequence portion
  source 1..21: mol_type = other RNA
gttttatcatcttcctcttca

SEQ ID NO: 11013 - RNA, 21 nt, synthetic construct
  misc_feature 1..21: note = HBV-targeting guide sequence portion
  source 1..21: mol_type = other RNA
gttttatcctaaattcaccaa

SEQ ID NO: 11014 - RNA, 21 nt, synthetic construct
  misc_feature 1..21: note = HBV-targeting guide sequence portion
  source 1..21: mol_type = other RNA
gttttccaatgagggttaaag

SEQ ID NO: 11015 - RNA, 21 nt, synthetic construct
  misc_feature 1..21: note = HBV-targeting guide sequence portion
  source 1..21: mol_type = other RNA
gttttccttgttgacaagaat

SEQ ID NO: 11016 - RNA, 21 nt, synthetic construct
  misc_feature 1..21: note = HBV-targeting guide sequence portion
  source 1..21: mol_type = other RNA
gttttctgaaacattctttga

SEQ ID NO: 11017 - RNA, 21 nt, synthetic construct
  misc_feature 1..21: note = HBV-targeting guide sequence portion
  source 1..21: mol_type = other RNA
gttttgctcgcagccggtctg

SEQ ID NO: 11018 - RNA, 21 nt, synthetic construct
  misc_feature 1..21: note = HBV-targeting guide sequence portion
  source 1..21: mol_type = other RNA
gttttgctgccccttttacac

SEQ ID NO: 11019 - RNA, 21 nt, synthetic construct
  misc_feature 1..21: note = HBV-targeting guide sequence portion
  source 1..21: mol_type = other RNA
gttttgtacagcaacaggagg

SEQ ID NO: 11020 - RNA, 21 nt, synthetic construct
  misc_feature 1..21: note = HBV-targeting guide sequence portion
  source 1..21: mol_type = other RNA
gttttgttagggtttaaatgt

SEQ ID NO: 11021 - RNA, 21 nt, synthetic construct
  misc_feature 1..21: note = HBV-targeting guide sequence portion
  source 1..21: mol_type = other RNA
gtttttgccttctgacttctt

SEQ ID NO: 11022 - RNA, 21 nt, synthetic construct
  misc_feature 1..21: note = HBV-targeting guide sequence portion
  source 1..21: mol_type = other RNA
taaaacacccgccttccatag

SEQ ID NO: 11023 - RNA, 21 nt, synthetic construct
  misc_feature 1..21: note = HBV-targeting guide sequence portion
  source 1..21: mol_type = other RNA
taaaacctagcaggcataatc

SEQ ID NO: 11024 - RNA, 21 nt, synthetic construct
  misc_feature 1..21: note = HBV-targeting guide sequence portion
  source 1..21: mol_type = other RNA
taaaacgccgcagacacatcc

SEQ ID NO: 11025 - RNA, 21 nt, synthetic construct
  misc_feature 1..21: note = HBV-targeting guide sequence portion
  source 1..21: mol_type = other RNA
taaaaggggcagcaaaaccca

SEQ ID NO: 11026 - RNA, 21 nt, synthetic construct
  misc_feature 1..21: note = HBV-targeting guide sequence portion
  source 1..21: mol_type = other RNA
taaaatttcccaccttatgag

SEQ ID NO: 11027 - RNA, 21 nt, synthetic construct
  misc_feature 1..21: note = HBV-targeting guide sequence portion
  source 1..21: mol_type = other RNA
taaacaaacagtctttgaagt

SEQ ID NO: 11028 - RNA, 21 nt, synthetic construct
  misc_feature 1..21: note = HBV-targeting guide sequence portion
  source 1..21: mol_type = other RNA
taaacaaaggacgtcccgcgc

SEQ ID NO: 11029 - RNA, 21 nt, synthetic construct
  misc_feature 1..21: note = HBV-targeting guide sequence portion
  source 1..21: mol_type = other RNA
taaacaatacctgaaccttta

SEQ ID NO: 11030 - RNA, 21 nt, synthetic construct
  misc_feature 1..21: note = HBV-targeting guide sequence portion
  source 1..21: mol_type = other RNA
taaaccctaacaaaacaaaga

SEQ ID NO: 11031 - RNA, 21 nt, synthetic construct
  misc_feature 1..21: note = HBV-targeting guide sequence portion
  source 1..21: mol_type = other RNA
taaaccctgttccgactactg

SEQ ID NO: 11032 - RNA, 21 nt, synthetic construct
  misc_feature 1..21: note = HBV-targeting guide sequence portion
  source 1..21: mol_type = other RNA
taaaccttattatccagaaca

SEQ ID NO: 11033 - RNA, 21 nt, synthetic construct
  misc_feature 1..21: note = HBV-targeting guide sequence portion
  source 1..21: mol_type = other RNA
taaactgagccaagagaaacg

SEQ ID NO: 11034 - RNA, 21 nt, synthetic construct
  misc_feature 1..21: note = HBV-targeting guide sequence portion
  source 1..21: mol_type = other RNA
taaagaatttggagctactgt

SEQ ID NO: 11035 - RNA, 21 nt, synthetic construct
  misc_feature 1..21: note = HBV-targeting guide sequence portion
  source 1..21: mol_type = other RNA
taaagacaggtacagtagaag

SEQ ID NO: 11036 - RNA, 21 nt, synthetic construct
  misc_feature 1..21: note = HBV-targeting guide sequence portion
  source 1..21: mol_type = other RNA
taaagactgggaggagttggg

SEQ ID NO: 11037 - RNA, 21 nt, synthetic construct
  misc_feature 1..21: note = HBV-targeting guide sequence portion
  source 1..21: mol_type = other RNA
taaagagaggtgcgccccgtg

SEQ ID NO: 11038 - RNA, 21 nt, synthetic construct
  misc_feature 1..21: note = HBV-targeting guide sequence portion
  source 1..21: mol_type = other RNA
taaagcaggataaccacattg

SEQ ID NO: 11039 - RNA, 21 nt, synthetic construct
  misc_feature 1..21: note = HBV-targeting guide sequence portion
  source 1..21: mol_type = other RNA
taaagccacccaaggcacagc

SEQ ID NO: 11040 - RNA, 21 nt, synthetic construct
  misc_feature 1..21: note = HBV-targeting guide sequence portion
  source 1..21: mol_type = other RNA
taaagccccgtaaaatttccc

SEQ ID NO: 11041 - RNA, 21 nt, synthetic construct
  misc_feature 1..21: note = HBV-targeting guide sequence portion
  source 1..21: mol_type = other RNA
taaagggactcaagatgctgt

SEQ ID NO: 11042 - RNA, 21 nt, synthetic construct
  misc_feature 1..21: note = HBV-targeting guide sequence portion
  source 1..21: mol_type = other RNA
taaaggttcaggtattgttta

SEQ ID NO: 11043 - RNA, 21 nt, synthetic construct
  misc_feature 1..21: note = HBV-targeting guide sequence portion
  source 1..21: mol_type = other RNA
taaagttcagacaactattgt

SEQ ID NO: 11044 - RNA, 21 nt, synthetic construct
  misc_feature 1..21: note = HBV-targeting guide sequence portion
  source 1..21: mol_type = other RNA
taaatagtgtctagtttggaa

SEQ ID NO: 11045 - RNA, 21 nt, synthetic construct
  misc_feature 1..21: note = HBV-targeting guide sequence portion
  source 1..21: mol_type = other RNA
taaatgtacacccaaagacaa

SEQ ID NO: 11046 - RNA, 21 nt, synthetic construct
  misc_feature 1..21: note = HBV-targeting guide sequence portion
  source 1..21: mol_type = other RNA
taaattagtacccacccaggt

SEQ ID NO: 11047 - RNA, 21 nt, synthetic construct
  misc_feature 1..21: note = HBV-targeting guide sequence portion
  source 1..21: mol_type = other RNA
taaattcaccaaatacttgcc

SEQ ID NO: 11048 - RNA, 21 nt, synthetic construct
  misc_feature 1..21: note = HBV-targeting guide sequence portion
  source 1..21: mol_type = other RNA
taaattggtctgcgcaccagc

SEQ ID NO: 11049 - RNA, 21 nt, synthetic construct
  misc_feature 1..21: note = HBV-targeting guide sequence portion
  source 1..21: mol_type = other RNA
taacaaaacaaagagatgggg

SEQ ID NO: 11050 - RNA, 21 nt, synthetic construct
  misc_feature 1..21: note = HBV-targeting guide sequence portion
  source 1..21: mol_type = other RNA
taacaacacaagtctccggaa

SEQ ID NO: 11051 - RNA, 21 nt, synthetic construct
  misc_feature 1..21: note = HBV-targeting guide sequence portion
  source 1..21: mol_type = other RNA
taacacgagcaggggtcctag

SEQ ID NO: 11052 - RNA, 21 nt, synthetic construct
  misc_feature 1..21: note = HBV-targeting guide sequence portion
  source 1..21: mol_type = other RNA
taacagcggtataaagggact

SEQ ID NO: 11053 - RNA, 21 nt, synthetic construct
  misc_feature 1..21: note = HBV-targeting guide sequence portion
  source 1..21: mol_type = other RNA
taacaggcctattgattggaa

SEQ ID NO: 11054 - RNA, 21 nt, synthetic construct
  misc_feature 1..21: note = HBV-targeting guide sequence portion
  source 1..21: mol_type = other RNA
taacattgagatccccgagat

SEQ ID NO: 11055 - RNA, 21 nt, synthetic construct
  misc_feature 1..21: note = HBV-targeting guide sequence portion
  source 1..21: mol_type = other RNA
taaccacattgtgtaaaaggg

SEQ ID NO: 11056 - RNA, 21 nt, synthetic construct
  misc_feature 1..21: note = HBV-targeting guide sequence portion
  source 1..21: mol_type = other RNA
taaccaggacaagttggagga

SEQ ID NO: 11057 - RNA, 21 nt, synthetic construct
  misc_feature 1..21: note = HBV-targeting guide sequence portion
  source 1..21: mol_type = other RNA
taaccccatctctttgttttg

SEQ ID NO: 11058 - RNA, 21 nt, synthetic construct
  misc_feature 1..21: note = HBV-targeting guide sequence portion
  source 1..21: mol_type = other RNA
taaccctcattggaaaacacc

SEQ ID NO: 11059 - RNA, 21 nt, synthetic construct
  misc_feature 1..21: note = HBV-targeting guide sequence portion
  source 1..21: mol_type = other RNA
taaccgggagttttctgaaac

SEQ ID NO: 11060 - RNA, 21 nt, synthetic construct
  misc_feature 1..21: note = HBV-targeting guide sequence portion
  source 1..21: mol_type = other RNA
taactagatgttctggataat

SEQ ID NO: 11061 - RNA, 21 nt, synthetic construct
  misc_feature 1..21: note = HBV-targeting guide sequence portion
  source 1..21: mol_type = other RNA
taactccacagtagctccaaa

SEQ ID NO: 11062 - RNA, 21 nt, synthetic construct
  misc_feature 1..21: note = HBV-targeting guide sequence portion
  source 1..21: mol_type = other RNA
taactgaaagccaaacagtgg

SEQ ID NO: 11063 - RNA, 21 nt, synthetic construct
  misc_feature 1..21: note = HBV-targeting guide sequence portion
  source 1..21: mol_type = other RNA
taactgactactaggtcccta

SEQ ID NO: 11064 - RNA, 21 nt, synthetic construct
  misc_feature 1..21: note = HBV-targeting guide sequence portion
  source 1..21: mol_type = other RNA
taactgtaagcgggcctacaa

SEQ ID NO: 11065 - RNA, 21 nt, synthetic construct
  misc_feature 1..21: note = HBV-targeting guide sequence portion
  source 1..21: mol_type = other RNA
taagacaagaaatgtgaaacc

SEQ ID NO: 11066 - RNA, 21 nt, synthetic construct
  misc_feature 1..21: note = HBV-targeting guide sequence portion
  source 1..21: mol_type = other RNA
taagaccttgggcaagaattg

SEQ ID NO: 11067 - RNA, 21 nt, synthetic construct
  misc_feature 1..21: note = HBV-targeting guide sequence portion
  source 1..21: mol_type = other RNA
taagagaataaccccatctct

SEQ ID NO: 11068 - RNA, 21 nt, synthetic construct
  misc_feature 1..21: note = HBV-targeting guide sequence portion
  source 1..21: mol_type = other RNA
taagagagtgtcaacacatag

SEQ ID NO: 11069 - RNA, 21 nt, synthetic construct
  misc_feature 1..21: note = HBV-targeting guide sequence portion
  source 1..21: mol_type = other RNA
taagaggactcttggactctc

SEQ ID NO: 11070 - RNA, 21 nt, synthetic construct
  misc_feature 1..21: note = HBV-targeting guide sequence portion
  source 1..21: mol_type = other RNA
taagcaggctttcactttttc

SEQ ID NO: 11071 - RNA, 21 nt, synthetic construct
  misc_feature 1..21: note = HBV-targeting guide sequence portion
  source 1..21: mol_type = other RNA
taagcgggcctacaaactgtt

SEQ ID NO: 11072 - RNA, 21 nt, synthetic construct
  misc_feature 1..21: note = HBV-targeting guide sequence portion
  source 1..21: mol_type = other RNA
taagctggaggagtgcgaatc

SEQ ID NO: 11073 - RNA, 21 nt, synthetic construct
  misc_feature 1..21: note = HBV-targeting guide sequence portion
  source 1..21: mol_type = other RNA
taagggtattaaaccttatta

SEQ ID NO: 11074 - RNA, 21 nt, synthetic construct
  misc_feature 1..21: note = HBV-targeting guide sequence portion
  source 1..21: mol_type = other RNA
taaggtgggaaattttacggg

SEQ ID NO: 11075 - RNA, 21 nt, synthetic construct
  misc_feature 1..21: note = HBV-targeting guide sequence portion
  source 1..21: mol_type = other RNA
taaggtttaatacccttatcc

SEQ ID NO: 11076 - RNA, 21 nt, synthetic construct
  misc_feature 1..21: note = HBV-targeting guide sequence portion
  source 1..21: mol_type = other RNA
taagttggcgaaaaagtgaaa

SEQ ID NO: 11077 - RNA, 21 nt, synthetic construct
  misc_feature 1..21: note = HBV-targeting guide sequence portion
  source 1..21: mol_type = other RNA
taataaggtttaataccctta

SEQ ID NO: 11078 - RNA, 21 nt, synthetic construct
  misc_feature 1..21: note = HBV-targeting guide sequence portion
  source 1..21: mol_type = other RNA
taatacccttatccaagggca

SEQ ID NO: 11079 - RNA, 21 nt, synthetic construct
  misc_feature 1..21: note = HBV-targeting guide sequence portion
  source 1..21: mol_type = other RNA
taatatacatctacaccaaga

SEQ ID NO: 11080 - RNA, 21 nt, synthetic construct
  misc_feature 1..21: note = HBV-targeting guide sequence portion
  source 1..21: mol_type = other RNA
taatatcttggtgtagatgta

SEQ ID NO: 11081 - RNA, 21 nt, synthetic construct
  misc_feature 1..21: note = HBV-targeting guide sequence portion
  source 1..21: mol_type = other RNA
taatcaatttcaaccgtcttt

SEQ ID NO: 11082 - RNA, 21 nt, synthetic construct
  misc_feature 1..21: note = HBV-targeting guide sequence portion
  source 1..21: mol_type = other RNA
taatcatctcttgttcatgtc

SEQ ID NO: 11083 - RNA, 21 nt, synthetic construct
  misc_feature 1..21: note = HBV-targeting guide sequence portion
  source 1..21: mol_type = other RNA
taatcattacttccaaactag

SEQ ID NO: 11084 - RNA, 21 nt, synthetic construct
  misc_feature 1..21: note = HBV-targeting guide sequence portion
  source 1..21: mol_type = other RNA
taatctaatctcctcccccaa

SEQ ID NO: 11085 - RNA, 21 nt, synthetic construct
  misc_feature 1..21: note = HBV-targeting guide sequence portion
  source 1..21: mol_type = other RNA
taatctcctcccccaactcct

SEQ ID NO: 11086 - RNA, 21 nt, synthetic construct
  misc_feature 1..21: note = HBV-targeting guide sequence portion
  source 1..21: mol_type = other RNA
taatgactctagctacctggg

SEQ ID NO: 11087 - RNA, 21 nt, synthetic construct
  misc_feature 1..21: note = HBV-targeting guide sequence portion
  source 1..21: mol_type = other RNA
taatgagaaaagacggttgaa

SEQ ID NO: 11088 - RNA, 21 nt, synthetic construct
  misc_feature 1..21: note = HBV-targeting guide sequence portion
  source 1..21: mol_type = other RNA
taatgatctttgtactaggag

SEQ ID NO: 11089 - RNA, 21 nt, synthetic construct
  misc_feature 1..21: note = HBV-targeting guide sequence portion
  source 1..21: mol_type = other RNA
taatgattaactagatgttct

SEQ ID NO: 11090 - RNA, 21 nt, synthetic construct
  misc_feature 1..21: note = HBV-targeting guide sequence portion
  source 1..21: mol_type = other RNA
taatgcaaaccttgccagcaa

SEQ ID NO: 11091 - RNA, 21 nt, synthetic construct
  misc_feature 1..21: note = HBV-targeting guide sequence portion
  source 1..21: mol_type = other RNA
taatgcccttgtatgcatgta

SEQ ID NO: 11092 - RNA, 21 nt, synthetic construct
  misc_feature 1..21: note = HBV-targeting guide sequence portion
  source 1..21: mol_type = other RNA
taattccaggatcatcaacca

SEQ ID NO: 11093 - RNA, 21 nt, synthetic construct
  misc_feature 1..21: note = HBV-targeting guide sequence portion
  source 1..21: mol_type = other RNA
taatttagaagatcaagcatc

SEQ ID NO: 11094 - RNA, 21 nt, synthetic construct
  misc_feature 1..21: note = HBV-targeting guide sequence portion
  source 1..21: mol_type = other RNA
taatttcatgggctatgtcat

SEQ ID NO: 11095 - RNA, 21 nt, synthetic construct
  misc_feature 1..21: note = HBV-targeting guide sequence portion
  source 1..21: mol_type = other RNA
tacaaaaccttcggatggaaa

SEQ ID NO: 11096 - RNA, 21 nt, synthetic construct
  misc_feature 1..21: note = HBV-targeting guide sequence portion
  source 1..21: mol_type = other RNA
tacaaactgttcacatttttt

SEQ ID NO: 11097 - RNA, 21 nt, synthetic construct
  misc_feature 1..21: note = HBV-targeting guide sequence portion
  source 1..21: mol_type = other RNA
tacaaagatcattaatctaat

SEQ ID NO: 11098 - RNA, 21 nt, synthetic construct
  misc_feature 1..21: note = HBV-targeting guide sequence portion
  source 1..21: mol_type = other RNA
tacaaggcctttctgtgtaaa

SEQ ID NO: 11099 - RNA, 21 nt, synthetic construct
  misc_feature 1..21: note = HBV-targeting guide sequence portion
  source 1..21: mol_type = other RNA
tacaagggcattaaagcagga

SEQ ID NO: 11100 - RNA, 21 nt, synthetic construct
  misc_feature 1..21: note = HBV-targeting guide sequence portion
  source 1..21: mol_type = other RNA
tacacaaaatcaaagaatgtt

SEQ ID NO: 11101 - RNA, 21 nt, synthetic construct
  misc_feature 1..21: note = HBV-targeting guide sequence portion
  source 1..21: mol_type = other RNA
tacacaatgtggttatcctgc

SEQ ID NO: 11102 - RNA, 21 nt, synthetic construct
  misc_feature 1..21: note = HBV-targeting guide sequence portion
  source 1..21: mol_type = other RNA
tacacactctatggaaggcgg

SEQ ID NO: 11103 - RNA, 21 nt, synthetic construct
  misc_feature 1..21: note = HBV-targeting guide sequence portion
  source 1..21: mol_type = other RNA
tacacagaaaggccttgtaag

SEQ ID NO: 11104 - RNA, 21 nt, synthetic construct
  misc_feature 1..21: note = HBV-targeting guide sequence portion
  source 1..21: mol_type = other RNA
tacaccaagatattatcaaaa

SEQ ID NO: 11105 - RNA, 21 nt, synthetic construct
  misc_feature 1..21: note = HBV-targeting guide sequence portion
  source 1..21: mol_type = other RNA
tacacccaaagacaaaagaaa

SEQ ID NO: 11106 - RNA, 21 nt, synthetic construct
  misc_feature 1..21: note = HBV-targeting guide sequence portion
  source 1..21: mol_type = other RNA
tacagacttggcccccaatac

SEQ ID NO: 11107 - RNA, 21 nt, synthetic construct
  misc_feature 1..21: note = HBV-targeting guide sequence portion
  source 1..21: mol_type = other RNA
tacagagctgcggcggtatct

SEQ ID NO: 11108 - RNA, 21 nt, synthetic construct
  misc_feature 1..21: note = HBV-targeting guide sequence portion
  source 1..21: mol_type = other RNA
tacagcaacaggagggataca

SEQ ID NO: 11109 - RNA, 21 nt, synthetic construct
  misc_feature 1..21: note = HBV-targeting guide sequence portion
  source 1..21: mol_type = other RNA
tacagcatcttgagtcccttt

SEQ ID NO: 11110 - RNA, 21 nt, synthetic construct
  misc_feature 1..21: note = HBV-targeting guide sequence portion
  source 1..21: mol_type = other RNA
tacagcatggggcagaatctt

SEQ ID NO: 11111 - RNA, 21 nt, synthetic construct
  misc_feature 1..21: note = HBV-targeting guide sequence portion
  source 1..21: mol_type = other RNA
tacagcctcctagtacaaaga

SEQ ID NO: 11112 - RNA, 21 nt, synthetic construct
  misc_feature 1..21: note = HBV-targeting guide sequence portion
  source 1..21: mol_type = other RNA
tacaggcctctcactctggga

SEQ ID NO: 11113 - RNA, 21 nt, synthetic construct
  misc_feature 1..21: note = HBV-targeting guide sequence portion
  source 1..21: mol_type = other RNA
tacaggcggggttttccttgt

SEQ ID NO: 11114 - RNA, 21 nt, synthetic construct
  misc_feature 1..21: note = HBV-targeting guide sequence portion
  source 1..21: mol_type = other RNA
tacaggtgcagtttccatccg

SEQ ID NO: 11115 - RNA, 21 nt, synthetic construct
  misc_feature 1..21: note = HBV-targeting guide sequence portion
  source 1..21: mol_type = other RNA
tacagtagaagaataaagccc

SEQ ID NO: 11116 - RNA, 21 nt, synthetic construct
  misc_feature 1..21: note = HBV-targeting guide sequence portion
  source 1..21: mol_type = other RNA
tacagttaatgagaaaagacg

SEQ ID NO: 11117 - RNA, 21 nt, synthetic construct
  misc_feature 1..21: note = HBV-targeting guide sequence portion
  source 1..21: mol_type = other RNA
tacataagaggactcttggac

SEQ ID NO: 11118 - RNA, 21 nt, synthetic construct
  misc_feature 1..21: note = HBV-targeting guide sequence portion
  source 1..21: mol_type = other RNA
tacatagaggttccttgagca

SEQ ID NO: 11119 - RNA, 21 nt, synthetic construct
  misc_feature 1..21: note = HBV-targeting guide sequence portion
  source 1..21: mol_type = other RNA
tacatcgttcccatggctgct

SEQ ID NO: 11120 - RNA, 21 nt, synthetic construct
  misc_feature 1..21: note = HBV-targeting guide sequence portion
  source 1..21: mol_type = other RNA
tacatctacaccaagatatta

SEQ ID NO: 11121 - RNA, 21 nt, synthetic construct
  misc_feature 1..21: note = HBV-targeting guide sequence portion
  source 1..21: mol_type = other RNA
tacatgcatacaagggcatta

SEQ ID NO: 11122 - RNA, 21 nt, synthetic construct
  misc_feature 1..21: note = HBV-targeting guide sequence portion
  source 1..21: mol_type = other RNA
tacatttaaaccctaacaaaa

SEQ ID NO: 11123 - RNA, 21 nt, synthetic construct
  misc_feature 1..21: note = HBV-targeting guide sequence portion
  source 1..21: mol_type = other RNA
taccaatcgccagtcaggacg

SEQ ID NO: 11124 - RNA, 21 nt, synthetic construct
  misc_feature 1..21: note = HBV-targeting guide sequence portion
  source 1..21: mol_type = other RNA
taccaattttcttttgtcttt

SEQ ID NO: 11125 - RNA, 21 nt, synthetic construct
  misc_feature 1..21: note = HBV-targeting guide sequence portion
  source 1..21: mol_type = other RNA
taccacatcatccatataact

SEQ ID NO: 11126 - RNA, 21 nt, synthetic construct
  misc_feature 1..21: note = HBV-targeting guide sequence portion
  source 1..21: mol_type = other RNA
tacccacccaggtagctagag

SEQ ID NO: 11127 - RNA, 21 nt, synthetic construct
  misc_feature 1..21: note = HBV-targeting guide sequence portion
  source 1..21: mol_type = other RNA
taccccgctgtctccacctct

SEQ ID NO: 11128 - RNA, 21 nt, synthetic construct
  misc_feature 1..21: note = HBV-targeting guide sequence portion
  source 1..21: mol_type = other RNA
taccccgttgccaggcaacgg

SEQ ID NO: 11129 - RNA, 21 nt, synthetic construct
  misc_feature 1..21: note = HBV-targeting guide sequence portion
  source 1..21: mol_type = other RNA
tacccttatccaagggcaagt

SEQ ID NO: 11130 - RNA, 21 nt, synthetic construct
  misc_feature 1..21: note = HBV-targeting guide sequence portion
  source 1..21: mol_type = other RNA
taccgcagagtctagactcgt

SEQ ID NO: 11131 - RNA, 21 nt, synthetic construct
  misc_feature 1..21: note = HBV-targeting guide sequence portion
  source 1..21: mol_type = other RNA
taccgccgcagctctgtatcg

SEQ ID NO: 11132 - RNA, 21 nt, synthetic construct
  misc_feature 1..21: note = HBV-targeting guide sequence portion
  source 1..21: mol_type = other RNA
taccgctgttaccaattttct

SEQ ID NO: 11133 - RNA, 21 nt, synthetic construct
  misc_feature 1..21: note = HBV-targeting guide sequence portion
  source 1..21: mol_type = other RNA
taccgtgtgtcttggccaaaa

SEQ ID NO: 11134 - RNA, 21 nt, synthetic construct
  misc_feature 1..21: note = HBV-targeting guide sequence portion
  source 1..21: mol_type = other RNA
tacctgaacctttaccccgtt

SEQ ID NO: 11135 - RNA, 21 nt, synthetic construct
  misc_feature 1..21: note = HBV-targeting guide sequence portion
  source 1..21: mol_type = other RNA
tacctgggtgggtactaattt

SEQ ID NO: 11136 - RNA, 21 nt, synthetic construct
  misc_feature 1..21: note = HBV-targeting guide sequence portion
  source 1..21: mol_type = other RNA
tacctgtctttaaccctcatt

SEQ ID NO: 11137 - RNA, 21 nt, synthetic construct
  misc_feature 1..21: note = HBV-targeting guide sequence portion
  source 1..21: mol_type = other RNA
taccttgatagtccagaagaa

SEQ ID NO: 11138 - RNA, 21 nt, synthetic construct
  misc_feature 1..21: note = HBV-targeting guide sequence portion
  source 1..21: mol_type = other RNA
taccttgttggcgtctggcca

SEQ ID NO: 11139 - RNA, 21 nt, synthetic construct
  misc_feature 1..21: note = HBV-targeting guide sequence portion
  source 1..21: mol_type = other RNA
tacgaaccactgaacaaatgg

SEQ ID NO: 11140 - RNA, 21 nt, synthetic construct
  misc_feature 1..21: note = HBV-targeting guide sequence portion
  source 1..21: mol_type = other RNA
tacgagatcttctagataccg

SEQ ID NO: 11141 - RNA, 21 nt, synthetic construct
  misc_feature 1..21: note = HBV-targeting guide sequence portion
  source 1..21: mol_type = other RNA
tacgcggactccccgtctgtg

SEQ ID NO: 11142 - RNA, 21 nt, synthetic construct
  misc_feature 1..21: note = HBV-targeting guide sequence portion
  source 1..21: mol_type = other RNA
tacggaaggaaagaagtcaga

SEQ ID NO: 11143 - RNA, 21 nt, synthetic construct
  misc_feature 1..21: note = HBV-targeting guide sequence portion
  source 1..21: mol_type = other RNA
tacggggctttattcttctac

SEQ ID NO: 11144 - RNA, 21 nt, synthetic construct
  misc_feature 1..21: note = HBV-targeting guide sequence portion
  source 1..21: mol_type = other RNA
tacgtcccgtcggcgctgaat

SEQ ID NO: 11145 - RNA, 21 nt, synthetic construct
  misc_feature 1..21: note = HBV-targeting guide sequence portion
  source 1..21: mol_type = other RNA
tactaacattgagatccccga

SEQ ID NO: 11146 - RNA, 21 nt, synthetic construct
  misc_feature 1..21: note = HBV-targeting guide sequence portion
  source 1..21: mol_type = other RNA
tactaatttagaagatcaagc

SEQ ID NO: 11147 - RNA, 21 nt, synthetic construct
  misc_feature 1..21: note = HBV-targeting guide sequence portion
  source 1..21: mol_type = other RNA
tactaggaggctgtaggcata

SEQ ID NO: 11148 - RNA, 21 nt, synthetic construct
  misc_feature 1..21: note = HBV-targeting guide sequence portion
  source 1..21: mol_type = other RNA
tactaggtccctagatgcttg

SEQ ID NO: 11149 - RNA, 21 nt, synthetic construct
  misc_feature 1..21: note = HBV-targeting guide sequence portion
  source 1..21: mol_type = other RNA
tactagtgccatttgttcagt

SEQ ID NO: 11150 - RNA, 21 nt, synthetic construct
  misc_feature 1..21: note = HBV-targeting guide sequence portion
  source 1..21: mol_type = other RNA
tactctaggaccgtttctctt

SEQ ID NO: 11151 - RNA, 21 nt, synthetic construct
  misc_feature 1..21: note = HBV-targeting guide sequence portion
  source 1..21: mol_type = other RNA
tactctcgtttttgccttctg

SEQ ID NO: 11152 - RNA, 21 nt, synthetic construct
  misc_feature 1..21: note = HBV-targeting guide sequence portion
  source 1..21: mol_type = other RNA
tactgcactcaggcaagcaat

SEQ ID NO: 11153 - RNA, 21 nt, synthetic construct
  misc_feature 1..21: note = HBV-targeting guide sequence portion
  source 1..21: mol_type = other RNA
tactgcctctcacatatcgtc

SEQ ID NO: 11154 - RNA, 21 nt, synthetic construct
  misc_feature 1..21: note = HBV-targeting guide sequence portion
  source 1..21: mol_type = other RNA
tactgcggaactcctagccgc

SEQ ID NO: 11155 - RNA, 21 nt, synthetic construct
  misc_feature 1..21: note = HBV-targeting guide sequence portion
  source 1..21: mol_type = other RNA
tactgtacctgtctttaaccc

SEQ ID NO: 11156 - RNA, 21 nt, synthetic construct
  misc_feature 1..21: note = HBV-targeting guide sequence portion
  source 1..21: mol_type = other RNA
tactgtggagttactctcgtt

SEQ ID NO: 11157 - RNA, 21 nt, synthetic construct
  misc_feature 1..21: note = HBV-targeting guide sequence portion
  source 1..21: mol_type = other RNA
tactgttcaagcctccaagct

SEQ ID NO: 11158 - RNA, 21 nt, synthetic construct
  misc_feature 1..21: note = HBV-targeting guide sequence portion
  source 1..21: mol_type = other RNA
tactgttcctgaactggagcc

SEQ ID NO: 11159 - RNA, 21 nt, synthetic construct
  misc_feature 1..21: note = HBV-targeting guide sequence portion
  source 1..21: mol_type = other RNA
tacttcaaagactgtttgttt

SEQ ID NO: 11160 - RNA, 21 nt, synthetic construct
  misc_feature 1..21: note = HBV-targeting guide sequence portion
  source 1..21: mol_type = other RNA
tacttccaaactagacactat

SEQ ID NO: 11161 - RNA, 21 nt, synthetic construct
  misc_feature 1..21: note = HBV-targeting guide sequence portion
  source 1..21: mol_type = other RNA
tacttgcccttggataagggt

SEQ ID NO: 11162 - RNA, 21 nt, synthetic construct
  misc_feature 1..21: note = HBV-targeting guide sequence portion
  source 1..21: mol_type = other RNA
tacttttggaagagaaacggt

SEQ ID NO: 11163 - RNA, 21 nt, synthetic construct
  misc_feature 1..21: note = HBV-targeting guide sequence portion
  source 1..21: mol_type = other RNA
tagaaaattgagagaagtcca

SEQ ID NO: 11164 - RNA, 21 nt, synthetic construct
  misc_feature 1..21: note = HBV-targeting guide sequence portion
  source 1..21: mol_type = other RNA
tagaagaagaactccctcgcc

SEQ ID NO: 11165 - RNA, 21 nt, synthetic construct
  misc_feature 1..21: note = HBV-targeting guide sequence portion
  source 1..21: mol_type = other RNA
tagaagaataaagccccgtaa

SEQ ID NO: 11166 - RNA, 21 nt, synthetic construct
  misc_feature 1..21: note = HBV-targeting guide sequence portion
  source 1..21: mol_type = other RNA
tagaagatcaagcatctaggg

SEQ ID NO: 11167 - RNA, 21 nt, synthetic construct
  misc_feature 1..21: note = HBV-targeting guide sequence portion
  source 1..21: mol_type = other RNA
tagaagatctcgtacggaagg

SEQ ID NO: 11168 - RNA, 21 nt, synthetic construct
  misc_feature 1..21: note = HBV-targeting guide sequence portion
  source 1..21: mol_type = other RNA
tagacactatttacacactct

SEQ ID NO: 11169 - RNA, 21 nt, synthetic construct
  misc_feature 1..21: note = HBV-targeting guide sequence portion
  source 1..21: mol_type = other RNA
tagaccaccaaatgcccctat

SEQ ID NO: 11170 - RNA, 21 nt, synthetic construct
  misc_feature 1..21: note = HBV-targeting guide sequence portion
  source 1..21: mol_type = other RNA
tagacgacgaggcaggtcccc

SEQ ID NO: 11171 - RNA, 21 nt, synthetic construct
  misc_feature 1..21: note = HBV-targeting guide sequence portion
  source 1..21: mol_type = other RNA
tagactcgtggtggacttctc

SEQ ID NO: 11172 - RNA, 21 nt, synthetic construct
  misc_feature 1..21: note = HBV-targeting guide sequence portion
  source 1..21: mol_type = other RNA
tagactctgcggtattgtgag

SEQ ID NO: 11173 - RNA, 21 nt, synthetic construct
  misc_feature 1..21: note = HBV-targeting guide sequence portion
  source 1..21: mol_type = other RNA
tagaggacagacgggaaacat

SEQ ID NO: 11174 - RNA, 21 nt, synthetic construct
  misc_feature 1..21: note = HBV-targeting guide sequence portion
  source 1..21: mol_type = other RNA
tagaggcaggaggcggatttg

SEQ ID NO: 11175 - RNA, 21 nt, synthetic construct
  misc_feature 1..21: note = HBV-targeting guide sequence portion
  source 1..21: mol_type = other RNA
tagaggttccttgagcaggag

SEQ ID NO: 11176 - RNA, 21 nt, synthetic construct
  misc_feature 1..21: note = HBV-targeting guide sequence portion
  source 1..21: mol_type = other RNA
tagagtatttggtgtcttttg

SEQ ID NO: 11177 - RNA, 21 nt, synthetic construct
  misc_feature 1..21: note = HBV-targeting guide sequence portion
  source 1..21: mol_type = other RNA
tagagtcattagttctcccca

SEQ ID NO: 11178 - RNA, 21 nt, synthetic construct
  misc_feature 1..21: note = HBV-targeting guide sequence portion
  source 1..21: mol_type = other RNA
tagagtgtgtaaatagtgtct

SEQ ID NO: 11179 - RNA, 21 nt, synthetic construct
  misc_feature 1..21: note = HBV-targeting guide sequence portion
  source 1..21: mol_type = other RNA
tagataccgccgcagctctgt

SEQ ID NO: 11180 - RNA, 21 nt, synthetic construct
  misc_feature 1..21: note = HBV-targeting guide sequence portion
  source 1..21: mol_type = other RNA
tagatgcttgatcttctaaat

SEQ ID NO: 11181 - RNA, 21 nt, synthetic construct
  misc_feature 1..21: note = HBV-targeting guide sequence portion
  source 1..21: mol_type = other RNA
tagatgtatattaggaaaaga

SEQ ID NO: 11182 - RNA, 21 nt, synthetic construct
  misc_feature 1..21: note = HBV-targeting guide sequence portion
  source 1..21: mol_type = other RNA
tagatgttctggataataagg

SEQ ID NO: 11183 - RNA, 21 nt, synthetic construct
  misc_feature 1..21: note = HBV-targeting guide sequence portion
  source 1..21: mol_type = other RNA
tagattaatgatctttgtact

SEQ ID NO: 11184 - RNA, 21 nt, synthetic construct
  misc_feature 1..21: note = HBV-targeting guide sequence portion
  source 1..21: mol_type = other RNA
tagattgaatacatgcataca

SEQ ID NO: 11185 - RNA, 21 nt, synthetic construct
  misc_feature 1..21: note = HBV-targeting guide sequence portion
  source 1..21: mol_type = other RNA
tagcagcaggatgaagaggaa

SEQ ID NO: 11186 - RNA, 21 nt, synthetic construct
  misc_feature 1..21: note = HBV-targeting guide sequence portion
  source 1..21: mol_type = other RNA
tagcagccatgggaacgatgt

SEQ ID NO: 11187 - RNA, 21 nt, synthetic construct
  misc_feature 1..21: note = HBV-targeting guide sequence portion
  source 1..21: mol_type = other RNA
tagcaggcataatcaatttca

SEQ ID NO: 11188 - RNA, 21 nt, synthetic construct
  misc_feature 1..21: note = HBV-targeting guide sequence portion
  source 1..21: mol_type = other RNA
tagcccatgaaattaagagaa

SEQ ID NO: 11189 - RNA, 21 nt, synthetic construct
  misc_feature 1..21: note = HBV-targeting guide sequence portion
  source 1..21: mol_type = other RNA
tagcccgaatgctccagctcc

SEQ ID NO: 11190 - RNA, 21 nt, synthetic construct
  misc_feature 1..21: note = HBV-targeting guide sequence portion
  source 1..21: mol_type = other RNA
tagccgcttgttttgctcgca

SEQ ID NO: 11191 - RNA, 21 nt, synthetic construct
  misc_feature 1..21: note = HBV-targeting guide sequence portion
  source 1..21: mol_type = other RNA
tagcgcctcattctgtgggtc

SEQ ID NO: 11192 - RNA, 21 nt, synthetic construct
  misc_feature 1..21: note = HBV-targeting guide sequence portion
  source 1..21: mol_type = other RNA
tagctacctgggtgggtacta

SEQ ID NO: 11193 - RNA, 21 nt, synthetic construct
  misc_feature 1..21: note = HBV-targeting guide sequence portion
  source 1..21: mol_type = other RNA
tagctagagtcattagttctc

SEQ ID NO: 11194 - RNA, 21 nt, synthetic construct
  misc_feature 1..21: note = HBV-targeting guide sequence portion
  source 1..21: mol_type = other RNA
tagctccaaattctttatatg

SEQ ID NO: 11195 - RNA, 21 nt, synthetic construct
  misc_feature 1..21: note = HBV-targeting guide sequence portion
  source 1..21: mol_type = other RNA
tagctcttgttcccaagaata

SEQ ID NO: 11196 - RNA, 21 nt, synthetic construct
  misc_feature 1..21: note = HBV-targeting guide sequence portion
  source 1..21: mol_type = other RNA
taggaaaagagggtgttttcc

SEQ ID NO: 11197 - RNA, 21 nt, synthetic construct
  misc_feature 1..21: note = HBV-targeting guide sequence portion
  source 1..21: mol_type = other RNA
taggaatcctgatgtgatgtt

SEQ ID NO: 11198 - RNA, 21 nt, synthetic construct
  misc_feature 1..21: note = HBV-targeting guide sequence portion
  source 1..21: mol_type = other RNA
taggaattttccgaaagccca

SEQ ID NO: 11199 - RNA, 21 nt, synthetic construct
  misc_feature 1..21: note = HBV-targeting guide sequence portion
  source 1..21: mol_type = other RNA
taggacatgaacaagagatga

SEQ ID NO: 11200 - RNA, 21 nt, synthetic construct
  misc_feature 1..21: note = HBV-targeting guide sequence portion
  source 1..21: mol_type = other RNA
taggacccctgctcgtgttac

SEQ ID NO: 11201 - RNA, 21 nt, synthetic construct
  misc_feature 1..21: note = HBV-targeting guide sequence portion
  source 1..21: mol_type = other RNA
taggaccgtttctcttccaaa

SEQ ID NO: 11202 - RNA, 21 nt, synthetic construct
  misc_feature 1..21: note = HBV-targeting guide sequence portion
  source 1..21: mol_type = other RNA
taggagctggagcattcgggc

SEQ ID NO: 11203 - RNA, 21 nt, synthetic construct
  misc_feature 1..21: note = HBV-targeting guide sequence portion
  source 1..21: mol_type = other RNA
taggaggctgtaggcataaat

SEQ ID NO: 11204 - RNA, 21 nt, synthetic construct
  misc_feature 1..21: note = HBV-targeting guide sequence portion
  source 1..21: mol_type = other RNA
taggagttccgcagtatggat

SEQ ID NO: 11205 - RNA, 21 nt, synthetic construct
  misc_feature 1..21: note = HBV-targeting guide sequence portion
  source 1..21: mol_type = other RNA
taggataaaacctagcaggca

SEQ ID NO: 11206 - RNA, 21 nt, synthetic construct
  misc_feature 1..21: note = HBV-targeting guide sequence portion
  source 1..21: mol_type = other RNA
taggataggggcatttggtgg

SEQ ID NO: 11207 - RNA, 21 nt, synthetic construct
  misc_feature 1..21: note = HBV-targeting guide sequence portion
  source 1..21: mol_type = other RNA
taggcagaggtgaaaaagttg

SEQ ID NO: 11208 - RNA, 21 nt, synthetic construct
  misc_feature 1..21: note = HBV-targeting guide sequence portion
  source 1..21: mol_type = other RNA
taggcataaattggtctgcgc

SEQ ID NO: 11209 - RNA, 21 nt, synthetic construct
  misc_feature 1..21: note = HBV-targeting guide sequence portion
  source 1..21: mol_type = other RNA
taggccatcagcgcatgcgtg

SEQ ID NO: 11210 - RNA, 21 nt, synthetic construct
  misc_feature 1..21: note = HBV-targeting guide sequence portion
  source 1..21: mol_type = other RNA
taggcccatatgagtgttgac

SEQ ID NO: 11211 - RNA, 21 nt, synthetic construct
  misc_feature 1..21: note = HBV-targeting guide sequence portion
  source 1..21: mol_type = other RNA
taggcccgcttacagttaatg

SEQ ID NO: 11212 - RNA, 21 nt, synthetic construct
  misc_feature 1..21: note = HBV-targeting guide sequence portion
  source 1..21: mol_type = other RNA
taggcctgttaaccgggagtt

SEQ ID NO: 11213 - RNA, 21 nt, synthetic construct
  misc_feature 1..21: note = HBV-targeting guide sequence portion
  source 1..21: mol_type = other RNA
taggctgccgtcctgactggc

SEQ ID NO: 11214 - RNA, 21 nt, synthetic construct
  misc_feature 1..21: note = HBV-targeting guide sequence portion
  source 1..21: mol_type = other RNA
taggctgtgctgccaactgga

SEQ ID NO: 11215 - RNA, 21 nt, synthetic construct
  misc_feature 1..21: note = HBV-targeting guide sequence portion
  source 1..21: mol_type = other RNA
tagggacctagtagtcagtta

SEQ ID NO: 11216 - RNA, 21 nt, synthetic construct
  misc_feature 1..21: note = HBV-targeting guide sequence portion
  source 1..21: mol_type = other RNA
tagggcatggacattgaccca

SEQ ID NO: 11217 - RNA, 21 nt, synthetic construct
  misc_feature 1..21: note = HBV-targeting guide sequence portion
  source 1..21: mol_type = other RNA
tagggctttcccccactgttt

SEQ ID NO: 11218 - RNA, 21 nt, synthetic construct
  misc_feature 1..21: note = HBV-targeting guide sequence portion
  source 1..21: mol_type = other RNA
taggggacctgcctcgtcgtc

SEQ ID NO: 11219 - RNA, 21 nt, synthetic construct
  misc_feature 1..21: note = HBV-targeting guide sequence portion
  source 1..21: mol_type = other RNA
taggggcatttggtggtctat

SEQ ID NO: 11220 - RNA, 21 nt, synthetic construct
  misc_feature 1..21: note = HBV-targeting guide sequence portion
  source 1..21: mol_type = other RNA
tagggggaactaccgtgtgtc

SEQ ID NO: 11221 - RNA, 21 nt, synthetic construct
  misc_feature 1..21: note = HBV-targeting guide sequence portion
  source 1..21: mol_type = other RNA
tagggttcaccccaccgcacg

SEQ ID NO: 11222 - RNA, 21 nt, synthetic construct
  misc_feature 1..21: note = HBV-targeting guide sequence portion
  source 1..21: mol_type = other RNA
tagggtttaaatgtacaccca

SEQ ID NO: 11223 - RNA, 21 nt, synthetic construct
  misc_feature 1..21: note = HBV-targeting guide sequence portion
  source 1..21: mol_type = other RNA
taggtccctagatgcttgatc

SEQ ID NO: 11224 - RNA, 21 nt, synthetic construct
  misc_feature 1..21: note = HBV-targeting guide sequence portion
  source 1..21: mol_type = other RNA
taggttttatcctaaattcac

SEQ ID NO: 11225 - RNA, 21 nt, synthetic construct
  misc_feature 1..21: note = HBV-targeting guide sequence portion
  source 1..21: mol_type = other RNA
tagtaaactgagccaagagaa

SEQ ID NO: 11226 - RNA, 21 nt, synthetic construct
  misc_feature 1..21: note = HBV-targeting guide sequence portion
  source 1..21: mol_type = other RNA
tagtacaaagatcattaatct

SEQ ID NO: 11227 - RNA, 21 nt, synthetic construct
  misc_feature 1..21: note = HBV-targeting guide sequence portion
  source 1..21: mol_type = other RNA
tagtacccacccaggtagcta

SEQ ID NO: 11228 - RNA, 21 nt, synthetic construct
  misc_feature 1..21: note = HBV-targeting guide sequence portion
  source 1..21: mol_type = other RNA
tagtagtcagttatgtcaaca

SEQ ID NO: 11229 - RNA, 21 nt, synthetic construct
  misc_feature 1..21: note = HBV-targeting guide sequence portion
  source 1..21: mol_type = other RNA
tagtatcccttggactcataa

SEQ ID NO: 11230 - RNA, 21 nt, synthetic construct
  misc_feature 1..21: note = HBV-targeting guide sequence portion
  source 1..21: mol_type = other RNA
tagtcagttatgtcaacactc

SEQ ID NO: 11231 - RNA, 21 nt, synthetic construct
  misc_feature 1..21: note = HBV-targeting guide sequence portion
  source 1..21: mol_type = other RNA
tagtccagaagaaccaacaag

SEQ ID NO: 11232 - RNA, 21 nt, synthetic construct
  misc_feature 1..21: note = HBV-targeting guide sequence portion
  source 1..21: mol_type = other RNA
tagtcggaacagggtttactg

SEQ ID NO: 11233 - RNA, 21 nt, synthetic construct
  misc_feature 1..21: note = HBV-targeting guide sequence portion
  source 1..21: mol_type = other RNA
tagtgccatttgttcagtggt

SEQ ID NO: 11234 - RNA, 21 nt, synthetic construct
  misc_feature 1..21: note = HBV-targeting guide sequence portion
  source 1..21: mol_type = other RNA
tagtgtctagtttggaagtaa

SEQ ID NO: 11235 - RNA, 21 nt, synthetic construct
  misc_feature 1..21: note = HBV-targeting guide sequence portion
  source 1..21: mol_type = other RNA
tagttaatcattacttccaaa

SEQ ID NO: 11236 - RNA, 21 nt, synthetic construct
  misc_feature 1..21: note = HBV-targeting guide sequence portion
  source 1..21: mol_type = other RNA
tagttccccctagaaaattga

SEQ ID NO: 11237 - RNA, 21 nt, synthetic construct
  misc_feature 1..21: note = HBV-targeting guide sequence portion
  source 1..21: mol_type = other RNA
tagttctccccagcaaagaat

SEQ ID NO: 11238 - RNA, 21 nt, synthetic construct
  misc_feature 1..21: note = HBV-targeting guide sequence portion
  source 1..21: mol_type = other RNA
tagttgtctgaactttaggcc

SEQ ID NO: 11239 - RNA, 21 nt, synthetic construct
  misc_feature 1..21: note = HBV-targeting guide sequence portion
  source 1..21: mol_type = other RNA
tagtttggaagtaatgattaa

SEQ ID NO: 11240 - RNA, 21 nt, synthetic construct
  misc_feature 1..21: note = HBV-targeting guide sequence portion
  source 1..21: mol_type = other RNA
tataaaacacccgccttccat

SEQ ID NO: 11241 - RNA, 21 nt, synthetic construct
  misc_feature 1..21: note = HBV-targeting guide sequence portion
  source 1..21: mol_type = other RNA
tataaagaatttggagctact

SEQ ID NO: 11242 - RNA, 21 nt, synthetic construct
  misc_feature 1..21: note = HBV-targeting guide sequence portion
  source 1..21: mol_type = other RNA
tataaagggactcaagatgct

SEQ ID NO: 11243 - RNA, 21 nt, synthetic construct
  misc_feature 1..21: note = HBV-targeting guide sequence portion
  source 1..21: mol_type = other RNA
tataactgaaagccaaacagt

SEQ ID NO: 11244 - RNA, 21 nt, synthetic construct
  misc_feature 1..21: note = HBV-targeting guide sequence portion
  source 1..21: mol_type = other RNA
tataagagagtgtcaacacat

SEQ ID NO: 11245 - RNA, 21 nt, synthetic construct
  misc_feature 1..21: note = HBV-targeting guide sequence portion
  source 1..21: mol_type = other RNA
tataagctggaggagtgcgaa

SEQ ID NO: 11246 - RNA, 21 nt, synthetic construct
  misc_feature 1..21: note = HBV-targeting guide sequence portion
  source 1..21: mol_type = other RNA
tatacatcgttcccatggctg

SEQ ID NO: 11247 - RNA, 21 nt, synthetic construct
  misc_feature 1..21: note = HBV-targeting guide sequence portion
  source 1..21: mol_type = other RNA
tatacatctacaccaagatat

SEQ ID NO: 11248 - RNA, 21 nt, synthetic construct
  misc_feature 1..21: note = HBV-targeting guide sequence portion
  source 1..21: mol_type = other RNA
tataccgctgttaccaatttt

SEQ ID NO: 11249 - RNA, 21 nt, synthetic construct
  misc_feature 1..21: note = HBV-targeting guide sequence portion
  source 1..21: mol_type = other RNA
tatagaccaccaaatgcccct

SEQ ID NO: 11250 - RNA, 21 nt, synthetic construct
  misc_feature 1..21: note = HBV-targeting guide sequence portion
  source 1..21: mol_type = other RNA
tatataaaacacccgccttcc

SEQ ID NO: 11251 - RNA, 21 nt, synthetic construct
  misc_feature 1..21: note = HBV-targeting guide sequence portion
  source 1..21: mol_type = other RNA
tatataagagagtgtcaacac

SEQ ID NO: 11252 - RNA, 21 nt, synthetic construct
  misc_feature 1..21: note = HBV-targeting guide sequence portion
  source 1..21: mol_type = other RNA
tatatggatgatgtggtattg

SEQ ID NO: 11253 - RNA, 21 nt, synthetic construct
  misc_feature 1..21: note = HBV-targeting guide sequence portion
  source 1..21: mol_type = other RNA
tatatgggtcaatgtccatgc

SEQ ID NO: 11254 - RNA, 21 nt, synthetic construct
  misc_feature 1..21: note = HBV-targeting guide sequence portion
  source 1..21: mol_type = other RNA
tatattaggaaaagagggtgt

SEQ ID NO: 11255 - RNA, 21 nt, synthetic construct
  misc_feature 1..21: note = HBV-targeting guide sequence portion
  source 1..21: mol_type = other RNA
tatatttgcgggagaggacaa

SEQ ID NO: 11256 - RNA, 21 nt, synthetic construct
  misc_feature 1..21: note = HBV-targeting guide sequence portion
  source 1..21: mol_type = other RNA
tatcaaaaaatgtgaacagtt

SEQ ID NO: 11257 - RNA, 21 nt, synthetic construct
  misc_feature 1..21: note = HBV-targeting guide sequence portion
  source 1..21: mol_type = other RNA
tatcaacacttccggagactt

SEQ ID NO: 11258 - RNA, 21 nt, synthetic construct
  misc_feature 1..21: note = HBV-targeting guide sequence portion
  source 1..21: mol_type = other RNA
tatcaaggtatgtttcccgtc

SEQ ID NO: 11259 - RNA, 21 nt, synthetic construct
  misc_feature 1..21: note = HBV-targeting guide sequence portion
  source 1..21: mol_type = other RNA
tatcatcttcctcttcatcct

SEQ ID NO: 11260 - RNA, 21 nt, synthetic construct
  misc_feature 1..21: note = HBV-targeting guide sequence portion
  source 1..21: mol_type = other RNA
tatccaagggcaagtatttgg

SEQ ID NO: 11261 - RNA, 21 nt, synthetic construct
  misc_feature 1..21: note = HBV-targeting guide sequence portion
  source 1..21: mol_type = other RNA
tatccagaacatctagttaat

SEQ ID NO: 11262 - RNA, 21 nt, synthetic construct
  misc_feature 1..21: note = HBV-targeting guide sequence portion
  source 1..21: mol_type = other RNA
tatccctcctgttgctgtaca

SEQ ID NO: 11263 - RNA, 21 nt, synthetic construct
  misc_feature 1..21: note = HBV-targeting guide sequence portion
  source 1..21: mol_type = other RNA
tatcccttggactcataaggt

SEQ ID NO: 11264 - RNA, 21 nt, synthetic construct
  misc_feature 1..21: note = HBV-targeting guide sequence portion
  source 1..21: mol_type = other RNA
tatcctaaattcaccaaatac

SEQ ID NO: 11265 - RNA, 21 nt, synthetic construct
  misc_feature 1..21: note = HBV-targeting guide sequence portion
  source 1..21: mol_type = other RNA
tatcctatcaacacttccgga

SEQ ID NO: 11266 - RNA, 21 nt, synthetic construct
  misc_feature 1..21: note = HBV-targeting guide sequence portion
  source 1..21: mol_type = other RNA
tatcctgctttaatgcccttg

SEQ ID NO: 11267 - RNA, 21 nt, synthetic construct
  misc_feature 1..21: note = HBV-targeting guide sequence portion
  source 1..21: mol_type = other RNA
tatcgctggatgtgtctgcgg

SEQ ID NO: 11268 - RNA, 21 nt, synthetic construct
  misc_feature 1..21: note = HBV-targeting guide sequence portion
  source 1..21: mol_type = other RNA
tatcgggatgccttggagtct

SEQ ID NO: 11269 - RNA, 21 nt, synthetic construct
  misc_feature 1..21: note = HBV-targeting guide sequence portion
  source 1..21: mol_type = other RNA
tatcgtcaatcttctcgagga

SEQ ID NO: 11270 - RNA, 21 nt, synthetic construct
  misc_feature 1..21: note = HBV-targeting guide sequence portion
  source 1..21: mol_type = other RNA
tatctagaagatctcgtacgg

SEQ ID NO: 11271 - RNA, 21 nt, synthetic construct
  misc_feature 1..21: note = HBV-targeting guide sequence portion
  source 1..21: mol_type = other RNA
tatctccctgctggtggctcc

SEQ ID NO: 11272 - RNA, 21 nt, synthetic construct
  misc_feature 1..21: note = HBV-targeting guide sequence portion
  source 1..21: mol_type = other RNA
tatcttggtgtagatgtatat

SEQ ID NO: 11273 - RNA, 21 nt, synthetic construct
  misc_feature 1..21: note = HBV-targeting guide sequence portion
  source 1..21: mol_type = other RNA
tatgaccaagccccaaccagt

SEQ ID NO: 11274 - RNA, 21 nt, synthetic construct
  misc_feature 1..21: note = HBV-targeting guide sequence portion
  source 1..21: mol_type = other RNA
tatgagtccaagggatactaa

SEQ ID NO: 11275 - RNA, 21 nt, synthetic construct
  misc_feature 1..21: note = HBV-targeting guide sequence portion
  source 1..21: mol_type = other RNA
tatgagtgttgacataactga

SEQ ID NO: 11276 - RNA, 21 nt, synthetic construct
  misc_feature 1..21: note = HBV-targeting guide sequence portion
  source 1..21: mol_type = other RNA
tatgatgtgattttgtggcaa

SEQ ID NO: 11277 - RNA, 21 nt, synthetic construct
  misc_feature 1..21: note = HBV-targeting guide sequence portion
  source 1..21: mol_type = other RNA
tatgcatgtattcaatctaag

SEQ ID NO: 11278 - RNA, 21 nt, synthetic construct
  misc_feature 1..21: note = HBV-targeting guide sequence portion
  source 1..21: mol_type = other RNA
tatgccctgagcctgagggct

SEQ ID NO: 11279 - RNA, 21 nt, synthetic construct
  misc_feature 1..21: note = HBV-targeting guide sequence portion
  source 1..21: mol_type = other RNA
tatgcctacagcctcctagta

SEQ ID NO: 11280 - RNA, 21 nt, synthetic construct
  misc_feature 1..21: note = HBV-targeting guide sequence portion
  source 1..21: mol_type = other RNA
tatgcctcaaggtcggtcgtt

SEQ ID NO: 11281 - RNA, 21 nt, synthetic construct
  misc_feature 1..21: note = HBV-targeting guide sequence portion
  source 1..21: mol_type = other RNA
tatgcctcatcttcttgttgg

SEQ ID NO: 11282 - RNA, 21 nt, synthetic construct
  misc_feature 1..21: note = HBV-targeting guide sequence portion
  source 1..21: mol_type = other RNA
tatgcctgctaggttttatcc

SEQ ID NO: 11283 - RNA, 21 nt, synthetic construct
  misc_feature 1..21: note = HBV-targeting guide sequence portion
  source 1..21: mol_type = other RNA
tatggaaggcgggtgttttat

SEQ ID NO: 11284 - RNA, 21 nt, synthetic construct
  misc_feature 1..21: note = HBV-targeting guide sequence portion
  source 1..21: mol_type = other RNA
tatggatcggcagaggagccg

SEQ ID NO: 11285 - RNA, 21 nt, synthetic construct
  misc_feature 1..21: note = HBV-targeting guide sequence portion
  source 1..21: mol_type = other RNA
tatggatgatgtggtattggg

SEQ ID NO: 11286 - RNA, 21 nt, synthetic construct
  misc_feature 1..21: note = HBV-targeting guide sequence portion
  source 1..21: mol_type = other RNA
tatgggagtgggcctcagccc

SEQ ID NO: 11287 - RNA, 21 nt, synthetic construct
  misc_feature 1..21: note = HBV-targeting guide sequence portion
  source 1..21: mol_type = other RNA
tatgggcctaaagttcagaca

SEQ ID NO: 11288 - RNA, 21 nt, synthetic construct
  misc_feature 1..21: note = HBV-targeting guide sequence portion
  source 1..21: mol_type = other RNA
tatgggtcaatgtccatgccc

SEQ ID NO: 11289 - RNA, 21 nt, synthetic construct
  misc_feature 1..21: note = HBV-targeting guide sequence portion
  source 1..21: mol_type = other RNA
tatggtgacccacagaatgag

SEQ ID NO: 11290 - RNA, 21 nt, synthetic construct
  misc_feature 1..21: note = HBV-targeting guide sequence portion
  source 1..21: mol_type = other RNA
tatggtgaggtgaacaatgct

SEQ ID NO: 11291 - RNA, 21 nt, synthetic construct
  misc_feature 1..21: note = HBV-targeting guide sequence portion
  source 1..21: mol_type = other RNA
tatgtaagaccttgggcaaga

SEQ ID NO: 11292 - RNA, 21 nt, synthetic construct
  misc_feature 1..21: note = HBV-targeting guide sequence portion
  source 1..21: mol_type = other RNA
tatgtatccctcctgttgctg

SEQ ID NO: 11293 - RNA, 21 nt, synthetic construct
  misc_feature 1..21: note = HBV-targeting guide sequence portion
  source 1..21: mol_type = other RNA
tatgtcaacactcatatgggc

SEQ ID NO: 11294 - RNA, 21 nt, synthetic construct
  misc_feature 1..21: note = HBV-targeting guide sequence portion
  source 1..21: mol_type = other RNA
tatgtcattgattgttgggga

SEQ ID NO: 11295 - RNA, 21 nt, synthetic construct
  misc_feature 1..21: note = HBV-targeting guide sequence portion
  source 1..21: mol_type = other RNA
tatgtgagaggcagtagtcgg

SEQ ID NO: 11296 - RNA, 21 nt, synthetic construct
  misc_feature 1..21: note = HBV-targeting guide sequence portion
  source 1..21: mol_type = other RNA
tatgtgttgacactctcttat

SEQ ID NO: 11297 - RNA, 21 nt, synthetic construct
  misc_feature 1..21: note = HBV-targeting guide sequence portion
  source 1..21: mol_type = other RNA
tatgtttcccgtctgtcctct

SEQ ID NO: 11298 - RNA, 21 nt, synthetic construct
  misc_feature 1..21: note = HBV-targeting guide sequence portion
  source 1..21: mol_type = other RNA
tattaaaccttattatccaga

SEQ ID NO: 11299 - RNA, 21 nt, synthetic construct
  misc_feature 1..21: note = HBV-targeting guide sequence portion
  source 1..21: mol_type = other RNA
tattaggaaaagagggtgttt

SEQ ID NO: 11300 - RNA, 21 nt, synthetic construct
  misc_feature 1..21: note = HBV-targeting guide sequence portion
  source 1..21: mol_type = other RNA
tattatcaaaaaatgtgaaca

SEQ ID NO: 11301 - RNA, 21 nt, synthetic construct
  misc_feature 1..21: note = HBV-targeting guide sequence portion
  source 1..21: mol_type = other RNA
tattatccagaacatctagtt

SEQ ID NO: 11302 - RNA, 21 nt, synthetic construct
  misc_feature 1..21: note = HBV-targeting guide sequence portion
  source 1..21: mol_type = other RNA
tattcaatctaagcaggcttt

SEQ ID NO: 11303 - RNA, 21 nt, synthetic construct
  misc_feature 1..21: note = HBV-targeting guide sequence portion
  source 1..21: mol_type = other RNA
tattcccatcccatcatcctg

SEQ ID NO: 11304 - RNA, 21 nt, synthetic construct
  misc_feature 1..21: note = HBV-targeting guide sequence portion
  source 1..21: mol_type = other RNA
tattctcttaatttcatgggc

SEQ ID NO: 11305 - RNA, 21 nt, synthetic construct
  misc_feature 1..21: note = HBV-targeting guide sequence portion
  source 1..21: mol_type = other RNA
tattcttctactgtacctgtc

SEQ ID NO: 11306 - RNA, 21 nt, synthetic construct
  misc_feature 1..21: note = HBV-targeting guide sequence portion
  source 1..21: mol_type = other RNA
tattcttgggaacaagagcta

SEQ ID NO: 11307 - RNA, 21 nt, synthetic construct
  misc_feature 1..21: note = HBV-targeting guide sequence portion
  source 1..21: mol_type = other RNA
tattgattggaaagtgtgtca

SEQ ID NO: 11308 - RNA, 21 nt, synthetic construct
  misc_feature 1..21: note = HBV-targeting guide sequence portion
  source 1..21: mol_type = other RNA
tattgggggccaagtctgtac

SEQ ID NO: 11309 - RNA, 21 nt, synthetic construct
  misc_feature 1..21: note = HBV-targeting guide sequence portion
  source 1..21: mol_type = other RNA
tattgtgaggattcttgtcaa

SEQ ID NO: 11310 - RNA, 21 nt, synthetic construct
  misc_feature 1..21: note = HBV-targeting guide sequence portion
  source 1..21: mol_type = other RNA
tattgtggtttcacatttctt

SEQ ID NO: 11311 - RNA, 21 nt, synthetic construct
  misc_feature 1..21: note = HBV-targeting guide sequence portion
  source 1..21: mol_type = other RNA
tattgtttacacagaaaggcc

SEQ ID NO: 11312 - RNA, 21 nt, synthetic construct
  misc_feature 1..21: note = HBV-targeting guide sequence portion
  source 1..21: mol_type = other RNA
tatttacacactctatggaag

SEQ ID NO: 11313 - RNA, 21 nt, synthetic construct
  misc_feature 1..21: note = HBV-targeting guide sequence portion
  source 1..21: mol_type = other RNA
tatttgcgggagaggacaaca

SEQ ID NO: 11314 - RNA, 21 nt, synthetic construct
  misc_feature 1..21: note = HBV-targeting guide sequence portion
  source 1..21: mol_type = other RNA
tatttggtgaatttaggataa

SEQ ID NO: 11315 - RNA, 21 nt, synthetic construct
  misc_feature 1..21: note = HBV-targeting guide sequence portion
  source 1..21: mol_type = other RNA
tatttggtgtcttttggagtg

SEQ ID NO: 11316 - RNA, 21 nt, synthetic construct
  misc_feature 1..21: note = HBV-targeting guide sequence portion
  source 1..21: mol_type = other RNA
tcaaaaaatgtgaacagtttg

SEQ ID NO: 11317 - RNA, 21 nt, synthetic construct
  misc_feature 1..21: note = HBV-targeting guide sequence portion
  source 1..21: mol_type = other RNA
tcaaagaatgtttcagaaaac

SEQ ID NO: 11318 - RNA, 21 nt, synthetic construct
  misc_feature 1..21: note = HBV-targeting guide sequence portion
  source 1..21: mol_type = other RNA
tcaaagactgtttgtttaaag

SEQ ID NO: 11319 - RNA, 21 nt, synthetic construct
  misc_feature 1..21: note = HBV-targeting guide sequence portion
  source 1..21: mol_type = other RNA
tcaacaaggaaaaccccgcct

SEQ ID NO: 11320 - RNA, 21 nt, synthetic construct
  misc_feature 1..21: note = HBV-targeting guide sequence portion
  source 1..21: mol_type = other RNA
tcaacacatagcgcctcattc

SEQ ID NO: 11321 - RNA, 21 nt, synthetic construct
  misc_feature 1..21: note = HBV-targeting guide sequence portion
  source 1..21: mol_type = other RNA
tcaacactcatatgggcctaa

SEQ ID NO: 11322 - RNA, 21 nt, synthetic construct
  misc_feature 1..21: note = HBV-targeting guide sequence portion
  source 1..21: mol_type = other RNA
tcaacacttccggagacttgt

SEQ ID NO: 11323 - RNA, 21 nt, synthetic construct
  misc_feature 1..21: note = HBV-targeting guide sequence portion
  source 1..21: mol_type = other RNA
tcaaccaccagcacgggaccc

SEQ ID NO: 11324 - RNA, 21 nt, synthetic construct
  misc_feature 1..21: note = HBV-targeting guide sequence portion
  source 1..21: mol_type = other RNA
tcaaccgtcttttctcattaa

SEQ ID NO: 11325 - RNA, 21 nt, synthetic construct
  misc_feature 1..21: note = HBV-targeting guide sequence portion
  source 1..21: mol_type = other RNA
tcaacgaattgtgggtcttct

SEQ ID NO: 11326 - RNA, 21 nt, synthetic construct
  misc_feature 1..21: note = HBV-targeting guide sequence portion
  source 1..21: mol_type = other RNA
tcaacgaccgaccttgaggca

SEQ ID NO: 11327 - RNA, 21 nt, synthetic construct
  misc_feature 1..21: note = HBV-targeting guide sequence portion
  source 1..21: mol_type = other RNA
tcaagatgctgtacagacttg

SEQ ID NO: 11328 - RNA, 21 nt, synthetic construct
  misc_feature 1..21: note = HBV-targeting guide sequence portion
  source 1..21: mol_type = other RNA
tcaagcatctagggacctagt

SEQ ID NO: 11329 - RNA, 21 nt, synthetic construct
  misc_feature 1..21: note = HBV-targeting guide sequence portion
  source 1..21: mol_type = other RNA
tcaagcctccaagctgtgcct

SEQ ID NO: 11330 - RNA, 21 nt, synthetic construct
  misc_feature 1..21: note = HBV-targeting guide sequence portion
  source 1..21: mol_type = other RNA
tcaaggaacctctatgtatcc

SEQ ID NO: 11331 - RNA, 21 nt, synthetic construct
  misc_feature 1..21: note = HBV-targeting guide sequence portion
  source 1..21: mol_type = other RNA
tcaaggtatgtttcccgtctg

SEQ ID NO: 11332 - RNA, 21 nt, synthetic construct
  misc_feature 1..21: note = HBV-targeting guide sequence portion
  source 1..21: mol_type = other RNA
tcaaggtcggtcgttgacatt

SEQ ID NO: 11333 - RNA, 21 nt, synthetic construct
  misc_feature 1..21: note = HBV-targeting guide sequence portion
  source 1..21: mol_type = other RNA
tcaataggcctgttaaccggg

SEQ ID NO: 11334 - RNA, 21 nt, synthetic construct
  misc_feature 1..21: note = HBV-targeting guide sequence portion
  source 1..21: mol_type = other RNA
tcaatcccaacaaggatccct

SEQ ID NO: 11335 - RNA, 21 nt, synthetic construct
  misc_feature 1..21: note = HBV-targeting guide sequence portion
  source 1..21: mol_type = other RNA
tcaatcgccgcgtcgcagaag

SEQ ID NO: 11336 - RNA, 21 nt, synthetic construct
  misc_feature 1..21: note = HBV-targeting guide sequence portion
  source 1..21: mol_type = other RNA
tcaatctaagcaggctttcac

SEQ ID NO: 11337 - RNA, 21 nt, synthetic construct
  misc_feature 1..21: note = HBV-targeting guide sequence portion
  source 1..21: mol_type = other RNA
tcaatctcggggatctcaatg

SEQ ID NO: 11338 - RNA, 21 nt, synthetic construct
  misc_feature 1..21: note = HBV-targeting guide sequence portion
  source 1..21: mol_type = other RNA
tcaatcttctcgaggattggg

SEQ ID NO: 11339 - RNA, 21 nt, synthetic construct
  misc_feature 1..21: note = HBV-targeting guide sequence portion
  source 1..21: mol_type = other RNA
tcaatgacatagcccatgaaa

SEQ ID NO: 11340 - RNA, 21 nt, synthetic construct
  misc_feature 1..21: note = HBV-targeting guide sequence portion
  source 1..21: mol_type = other RNA
tcaatgtccatgccctaaagc

SEQ ID NO: 11341 - RNA, 21 nt, synthetic construct
  misc_feature 1..21: note = HBV-targeting guide sequence portion
  source 1..21: mol_type = other RNA
tcaatgttagtatcccttgga

SEQ ID NO: 11342 - RNA, 21 nt, synthetic construct
  misc_feature 1..21: note = HBV-targeting guide sequence portion
  source 1..21: mol_type = other RNA
tcaatttcaaccgtcttttct

SEQ ID NO: 11343 - RNA, 21 nt, synthetic construct
  misc_feature 1..21: note = HBV-targeting guide sequence portion
  source 1..21: mol_type = other RNA
tcaattttctagggggaacta

SEQ ID NO: 11344 - RNA, 21 nt, synthetic construct
  misc_feature 1..21: note = HBV-targeting guide sequence portion
  source 1..21: mol_type = other RNA
tcacaataccgcagagtctag

SEQ ID NO: 11345 - RNA, 21 nt, synthetic construct
  misc_feature 1..21: note = HBV-targeting guide sequence portion
  source 1..21: mol_type = other RNA
tcacatatcgtcaatcttctc

SEQ ID NO: 11346 - RNA, 21 nt, synthetic construct
  misc_feature 1..21: note = HBV-targeting guide sequence portion
  source 1..21: mol_type = other RNA
tcacatcaggattcctaggac

SEQ ID NO: 11347 - RNA, 21 nt, synthetic construct
  misc_feature 1..21: note = HBV-targeting guide sequence portion
  source 1..21: mol_type = other RNA
tcacatcatacacaaaatcaa

SEQ ID NO: 11348 - RNA, 21 nt, synthetic construct
  misc_feature 1..21: note = HBV-targeting guide sequence portion
  source 1..21: mol_type = other RNA
tcacatttcttgtcttacttt

SEQ ID NO: 11349 - RNA, 21 nt, synthetic construct
  misc_feature 1..21: note = HBV-targeting guide sequence portion
  source 1..21: mol_type = other RNA
tcacattttttgataatatct

SEQ ID NO: 11350 - RNA, 21 nt, synthetic construct
  misc_feature 1..21: note = HBV-targeting guide sequence portion
  source 1..21: mol_type = other RNA
tcaccaaatacttgcccttgg

SEQ ID NO: 11351 - RNA, 21 nt, synthetic construct
  misc_feature 1..21: note = HBV-targeting guide sequence portion
  source 1..21: mol_type = other RNA
tcaccaacctcctgtcctcca

SEQ ID NO: 11352 - RNA, 21 nt, synthetic construct
  misc_feature 1..21: note = HBV-targeting guide sequence portion
  source 1..21: mol_type = other RNA
tcaccatactgcactcaggca

SEQ ID NO: 11353 - RNA, 21 nt, synthetic construct
  misc_feature 1..21: note = HBV-targeting guide sequence portion
  source 1..21: mol_type = other RNA
tcaccatattcttgggaacaa

SEQ ID NO: 11354 - RNA, 21 nt, synthetic construct
  misc_feature 1..21: note = HBV-targeting guide sequence portion
  source 1..21: mol_type = other RNA
tcaccccaccgcacggaggcc

SEQ ID NO: 11355 - RNA, 21 nt, synthetic construct
  misc_feature 1..21: note = HBV-targeting guide sequence portion
  source 1..21: mol_type = other RNA
tcacctcaccatactgcactc

SEQ ID NO: 11356 - RNA, 21 nt, synthetic construct
  misc_feature 1..21: note = HBV-targeting guide sequence portion
  source 1..21: mol_type = other RNA
tcacctctgcacgtcgcatgg

SEQ ID NO: 11357 - RNA, 21 nt, synthetic construct
  misc_feature 1..21: note = HBV-targeting guide sequence portion
  source 1..21: mol_type = other RNA
tcacctctgcctaatcatctc

SEQ ID NO: 11358 - RNA, 21 nt, synthetic construct
  misc_feature 1..21: note = HBV-targeting guide sequence portion
  source 1..21: mol_type = other RNA
tcacggtggtctccatgcgac

SEQ ID NO: 11359 - RNA, 21 nt, synthetic construct
  misc_feature 1..21: note = HBV-targeting guide sequence portion
  source 1..21: mol_type = other RNA
tcactcaccaacctcctgtcc

SEQ ID NO: 11360 - RNA, 21 nt, synthetic construct
  misc_feature 1..21: note = HBV-targeting guide sequence portion
  source 1..21: mol_type = other RNA
tcactctgggatcttgcagag

SEQ ID NO: 11361 - RNA, 21 nt, synthetic construct
  misc_feature 1..21: note = HBV-targeting guide sequence portion
  source 1..21: mol_type = other RNA
tcactttttcgccaacttaca

SEQ ID NO: 11362 - RNA, 21 nt, synthetic construct
  misc_feature 1..21: note = HBV-targeting guide sequence portion
  source 1..21: mol_type = other RNA
tcagaaaactcccggttaaca

SEQ ID NO: 11363 - RNA, 21 nt, synthetic construct
  misc_feature 1..21: note = HBV-targeting guide sequence portion
  source 1..21: mol_type = other RNA
tcagaaggcaaaaacgagagt

SEQ ID NO: 11364 - RNA, 21 nt, synthetic construct
  misc_feature 1..21: note = HBV-targeting guide sequence portion
  source 1..21: mol_type = other RNA
tcagacaactattgtggtttc

SEQ ID NO: 11365 - RNA, 21 nt, synthetic construct
  misc_feature 1..21: note = HBV-targeting guide sequence portion
  source 1..21: mol_type = other RNA
tcagagcaaactccaacaatc

SEQ ID NO: 11366 - RNA, 21 nt, synthetic construct
  misc_feature 1..21: note = HBV-targeting guide sequence portion
  source 1..21: mol_type = other RNA
tcagaggtggagacagcgggg

SEQ ID NO: 11367 - RNA, 21 nt, synthetic construct
  misc_feature 1..21: note = HBV-targeting guide sequence portion
  source 1..21: mol_type = other RNA
tcagcaaacacttggcacaga

SEQ ID NO: 11368 - RNA, 21 nt, synthetic construct
  misc_feature 1..21: note = HBV-targeting guide sequence portion
  source 1..21: mol_type = other RNA
tcagcccgtttctcttggctc

SEQ ID NO: 11369 - RNA, 21 nt, synthetic construct
  misc_feature 1..21: note = HBV-targeting guide sequence portion
  source 1..21: mol_type = other RNA
tcagcgcagggtccccaatcc

SEQ ID NO: 11370 - RNA, 21 nt, synthetic construct
  misc_feature 1..21: note = HBV-targeting guide sequence portion
  source 1..21: mol_type = other RNA
tcagcgcatgcgtggaacctt

SEQ ID NO: 11371 - RNA, 21 nt, synthetic construct
  misc_feature 1..21: note = HBV-targeting guide sequence portion
  source 1..21: mol_type = other RNA
tcagcgccgacgggacgtaaa

SEQ ID NO: 11372 - RNA, 21 nt, synthetic construct
  misc_feature 1..21: note = HBV-targeting guide sequence portion
  source 1..21: mol_type = other RNA
tcaggaacagtaaaccctgtt

SEQ ID NO: 11373 - RNA, 21 nt, synthetic construct
  misc_feature 1..21: note = HBV-targeting guide sequence portion
  source 1..21: mol_type = other RNA
tcaggacggcagcctaccccg

SEQ ID NO: 11374 - RNA, 21 nt, synthetic construct
  misc_feature 1..21: note = HBV-targeting guide sequence portion
  source 1..21: mol_type = other RNA
tcaggagactccaaggcatcc

SEQ ID NO: 11375 - RNA, 21 nt, synthetic construct
  misc_feature 1..21: note = HBV-targeting guide sequence portion
  source 1..21: mol_type = other RNA
tcaggattcctaggacccctg

SEQ ID NO: 11376 - RNA, 21 nt, synthetic construct
  misc_feature 1..21: note = HBV-targeting guide sequence portion
  source 1..21: mol_type = other RNA
tcaggcaagcaattctttgct

SEQ ID NO: 11377 - RNA, 21 nt, synthetic construct
  misc_feature 1..21: note = HBV-targeting guide sequence portion
  source 1..21: mol_type = other RNA
tcaggctcagggcataatgca

SEQ ID NO: 11378 - RNA, 21 nt, synthetic construct
  misc_feature 1..21: note = HBV-targeting guide sequence portion
  source 1..21: mol_type = other RNA
tcagggcataatgcaaacctt

SEQ ID NO: 11379 - RNA, 21 nt, synthetic construct
  misc_feature 1..21: note = HBV-targeting guide sequence portion
  source 1..21: mol_type = other RNA
tcaggtattgtttacacagaa

SEQ ID NO: 11380 - RNA, 21 nt, synthetic construct
  misc_feature 1..21: note = HBV-targeting guide sequence portion
  source 1..21: mol_type = other RNA
tcagtcccgagaatgtttgct

SEQ ID NO: 11381 - RNA, 21 nt, synthetic construct
  misc_feature 1..21: note = HBV-targeting guide sequence portion
  source 1..21: mol_type = other RNA
tcagtggttcgtagggctttc

SEQ ID NO: 11382 - RNA, 21 nt, synthetic construct
  misc_feature 1..21: note = HBV-targeting guide sequence portion
  source 1..21: mol_type = other RNA
tcagttatatggatgatgtgg

SEQ ID NO: 11383 - RNA, 21 nt, synthetic construct
  misc_feature 1..21: note = HBV-targeting guide sequence portion
  source 1..21: mol_type = other RNA
tcagttatgtcaacactcata

SEQ ID NO: 11384 - RNA, 21 nt, synthetic construct
  misc_feature 1..21: note = HBV-targeting guide sequence portion
  source 1..21: mol_type = other RNA
tcagtttactagtgccatttg

SEQ ID NO: 11385 - RNA, 21 nt, synthetic construct
  misc_feature 1..21: note = HBV-targeting guide sequence portion
  source 1..21: mol_type = other RNA
tcataaggtgggaaattttac

SEQ ID NO: 11386 - RNA, 21 nt, synthetic construct
  misc_feature 1..21: note = HBV-targeting guide sequence portion
  source 1..21: mol_type = other RNA
tcatacacaaaatcaaagaat

SEQ ID NO: 11387 - RNA, 21 nt, synthetic construct
  misc_feature 1..21: note = HBV-targeting guide sequence portion
  source 1..21: mol_type = other RNA
tcataggccatcagcgcatgc

SEQ ID NO: 11388 - RNA, 21 nt, synthetic construct
  misc_feature 1..21: note = HBV-targeting guide sequence portion
  source 1..21: mol_type = other RNA
tcatatgggcctaaagttcag

SEQ ID NO: 11389 - RNA, 21 nt, synthetic construct
  misc_feature 1..21: note = HBV-targeting guide sequence portion
  source 1..21: mol_type = other RNA
tcatcaaccaccagcacggga

SEQ ID NO: 11390 - RNA, 21 nt, synthetic construct
  misc_feature 1..21: note = HBV-targeting guide sequence portion
  source 1..21: mol_type = other RNA
tcatccatataactgaaagcc

SEQ ID NO: 11391 - RNA, 21 nt, synthetic construct
  misc_feature 1..21: note = HBV-targeting guide sequence portion
  source 1..21: mol_type = other RNA
tcatcctgctgctatgcctca

SEQ ID NO: 11392 - RNA, 21 nt, synthetic construct
  misc_feature 1..21: note = HBV-targeting guide sequence portion
  source 1..21: mol_type = other RNA
tcatcctgggctttcggaaaa

SEQ ID NO: 11393 - RNA, 21 nt, synthetic construct
  misc_feature 1..21: note = HBV-targeting guide sequence portion
  source 1..21: mol_type = other RNA
tcatctcttgttcatgtccta

SEQ ID NO: 11394 - RNA, 21 nt, synthetic construct
  misc_feature 1..21: note = HBV-targeting guide sequence portion
  source 1..21: mol_type = other RNA
tcatctgccggaccgtgtgca

SEQ ID NO: 11395 - RNA, 21 nt, synthetic construct
  misc_feature 1..21: note = HBV-targeting guide sequence portion
  source 1..21: mol_type = other RNA
tcatcttcctcttcatcctgc

SEQ ID NO: 11396 - RNA, 21 nt, synthetic construct
  misc_feature 1..21: note = HBV-targeting guide sequence portion
  source 1..21: mol_type = other RNA
tcatcttcttgttggttcttc

SEQ ID NO: 11397 - RNA, 21 nt, synthetic construct
  misc_feature 1..21: note = HBV-targeting guide sequence portion
  source 1..21: mol_type = other RNA
tcatgggctatgtcattgatt

SEQ ID NO: 11398 - RNA, 21 nt, synthetic construct
  misc_feature 1..21: note = HBV-targeting guide sequence portion
  source 1..21: mol_type = other RNA
tcatgtcctactgttcaagcc

SEQ ID NO: 11399 - RNA, 21 nt, synthetic construct
  misc_feature 1..21: note = HBV-targeting guide sequence portion
  source 1..21: mol_type = other RNA
tcattaactgtaagcgggcct

SEQ ID NO: 11400 - RNA, 21 nt, synthetic construct
  misc_feature 1..21: note = HBV-targeting guide sequence portion
  source 1..21: mol_type = other RNA
tcattaatctaatctcctccc

SEQ ID NO: 11401 - RNA, 21 nt, synthetic construct
  misc_feature 1..21: note = HBV-targeting guide sequence portion
  source 1..21: mol_type = other RNA
tcattacttccaaactagaca

SEQ ID NO: 11402 - RNA, 21 nt, synthetic construct
  misc_feature 1..21: note = HBV-targeting guide sequence portion
  source 1..21: mol_type = other RNA
tcattagttctccccagcaaa

SEQ ID NO: 11403 - RNA, 21 nt, synthetic construct
  misc_feature 1..21: note = HBV-targeting guide sequence portion
  source 1..21: mol_type = other RNA
tcattctgtgggtcaccatat

SEQ ID NO: 11404 - RNA, 21 nt, synthetic construct
  misc_feature 1..21: note = HBV-targeting guide sequence portion
  source 1..21: mol_type = other RNA
tcattgattgttggggatcat

SEQ ID NO: 11405 - RNA, 21 nt, synthetic construct
  misc_feature 1..21: note = HBV-targeting guide sequence portion
  source 1..21: mol_type = other RNA
tcattgccacaaaatcacatc

SEQ ID NO: 11406 - RNA, 21 nt, synthetic construct
  misc_feature 1..21: note = HBV-targeting guide sequence portion
  source 1..21: mol_type = other RNA
tcattggaaaacaccctcttt

SEQ ID NO: 11407 - RNA, 21 nt, synthetic construct
  misc_feature 1..21: note = HBV-targeting guide sequence portion
  source 1..21: mol_type = other RNA
tccaaaagacaccaaatactc

SEQ ID NO: 11408 - RNA, 21 nt, synthetic construct
  misc_feature 1..21: note = HBV-targeting guide sequence portion
  source 1..21: mol_type = other RNA
tccaaaagtaagacaagaaat

SEQ ID NO: 11409 - RNA, 21 nt, synthetic construct
  misc_feature 1..21: note = HBV-targeting guide sequence portion
  source 1..21: mol_type = other RNA
tccaaactagacactatttac

SEQ ID NO: 11410 - RNA, 21 nt, synthetic construct
  misc_feature 1..21: note = HBV-targeting guide sequence portion
  source 1..21: mol_type = other RNA
tccaaattctttatatgggtc

SEQ ID NO: 11411 - RNA, 21 nt, synthetic construct
  misc_feature 1..21: note = HBV-targeting guide sequence portion
  source 1..21: mol_type = other RNA
tccaacaatccagattgggac

SEQ ID NO: 11412 - RNA, 21 nt, synthetic construct
  misc_feature 1..21: note = HBV-targeting guide sequence portion
  source 1..21: mol_type = other RNA
tccaactggtggtcgggaaag

SEQ ID NO: 11413 - RNA, 21 nt, synthetic construct
  misc_feature 1..21: note = HBV-targeting guide sequence portion
  source 1..21: mol_type = other RNA
tccaacttgtcctggttatcg

SEQ ID NO: 11414 - RNA, 21 nt, synthetic construct
  misc_feature 1..21: note = HBV-targeting guide sequence portion
  source 1..21: mol_type = other RNA
tccaagagtcctcttatgtaa

SEQ ID NO: 11415 - RNA, 21 nt, synthetic construct
  misc_feature 1..21: note = HBV-targeting guide sequence portion
  source 1..21: mol_type = other RNA
tccaagctgtgccttgggtgg

SEQ ID NO: 11416 - RNA, 21 nt, synthetic construct
  misc_feature 1..21: note = HBV-targeting guide sequence portion
  source 1..21: mol_type = other RNA
tccaaggcatcccgatacaga

SEQ ID NO: 11417 - RNA, 21 nt, synthetic construct
  misc_feature 1..21: note = HBV-targeting guide sequence portion
  source 1..21: mol_type = other RNA
tccaagggatactaacattga

SEQ ID NO: 11418 - RNA, 21 nt, synthetic construct
  misc_feature 1..21: note = HBV-targeting guide sequence portion
  source 1..21: mol_type = other RNA
tccaagggcaagtatttggtg

SEQ ID NO: 11419 - RNA, 21 nt, synthetic construct
  misc_feature 1..21: note = HBV-targeting guide sequence portion
  source 1..21: mol_type = other RNA
tccaatcaataggcctgttaa

SEQ ID NO: 11420 - RNA, 21 nt, synthetic construct
  misc_feature 1..21: note = HBV-targeting guide sequence portion
  source 1..21: mol_type = other RNA
tccaatcactcaccaacctcc

SEQ ID NO: 11421 - RNA, 21 nt, synthetic construct
  misc_feature 1..21: note = HBV-targeting guide sequence portion
  source 1..21: mol_type = other RNA
tccaatgagggttaaagacag

SEQ ID NO: 11422 - RNA, 21 nt, synthetic construct
  misc_feature 1..21: note = HBV-targeting guide sequence portion
  source 1..21: mol_type = other RNA
tccacaaccttccaccaaact

SEQ ID NO: 11423 - RNA, 21 nt, synthetic construct
  misc_feature 1..21: note = HBV-targeting guide sequence portion
  source 1..21: mol_type = other RNA
tccacactccaaaagacacca

SEQ ID NO: 11424 - RNA, 21 nt, synthetic construct
  misc_feature 1..21: note = HBV-targeting guide sequence portion
  source 1..21: mol_type = other RNA
tccacagtagctccaaattct

SEQ ID NO: 11425 - RNA, 21 nt, synthetic construct
  misc_feature 1..21: note = HBV-targeting guide sequence portion
  source 1..21: mol_type = other RNA
tccaccaaactctgcaagatc

SEQ ID NO: 11426 - RNA, 21 nt, synthetic construct
  misc_feature 1..21: note = HBV-targeting guide sequence portion
  source 1..21: mol_type = other RNA
tccaccacgagtctagactct

SEQ ID NO: 11427 - RNA, 21 nt, synthetic construct
  misc_feature 1..21: note = HBV-targeting guide sequence portion
  source 1..21: mol_type = other RNA
tccaccagcaatcctctggga

SEQ ID NO: 11428 - RNA, 21 nt, synthetic construct
  misc_feature 1..21: note = HBV-targeting guide sequence portion
  source 1..21: mol_type = other RNA
tccaccccaaaaggcctccgt

SEQ ID NO: 11429 - RNA, 21 nt, synthetic construct
  misc_feature 1..21: note = HBV-targeting guide sequence portion
  source 1..21: mol_type = other RNA
tccacctctgagaaacactca

SEQ ID NO: 11430 - RNA, 21 nt, synthetic construct
  misc_feature 1..21: note = HBV-targeting guide sequence portion
  source 1..21: mol_type = other RNA
tccacgcatgcgctgatggcc

SEQ ID NO: 11431 - RNA, 21 nt, synthetic construct
  misc_feature 1..21: note = HBV-targeting guide sequence portion
  source 1..21: mol_type = other RNA
tccagaacatctagttaatca

SEQ ID NO: 11432 - RNA, 21 nt, synthetic construct
  misc_feature 1..21: note = HBV-targeting guide sequence portion
  source 1..21: mol_type = other RNA
tccagaagaaccaacaagaag

SEQ ID NO: 11433 - RNA, 21 nt, synthetic construct
  misc_feature 1..21: note = HBV-targeting guide sequence portion
  source 1..21: mol_type = other RNA
tccagaccggctgcgagcaaa

SEQ ID NO: 11434 - RNA, 21 nt, synthetic construct
  misc_feature 1..21: note = HBV-targeting guide sequence portion
  source 1..21: mol_type = other RNA
tccagattgggacttcaatcc

SEQ ID NO: 11435 - RNA, 21 nt, synthetic construct
  misc_feature 1..21: note = HBV-targeting guide sequence portion
  source 1..21: mol_type = other RNA
tccagcgataaccaggacaag

SEQ ID NO: 11436 - RNA, 21 nt, synthetic construct
  misc_feature 1..21: note = HBV-targeting guide sequence portion
  source 1..21: mol_type = other RNA
tccagctcctaccttgttggc

SEQ ID NO: 11437 - RNA, 21 nt, synthetic construct
  misc_feature 1..21: note = HBV-targeting guide sequence portion
  source 1..21: mol_type = other RNA
tccagcttatagaccaccaaa

SEQ ID NO: 11438 - RNA, 21 nt, synthetic construct
  misc_feature 1..21: note = HBV-targeting guide sequence portion
  source 1..21: mol_type = other RNA
tccaggatcatcaaccaccag

SEQ ID NO: 11439 - RNA, 21 nt, synthetic construct
  misc_feature 1..21: note = HBV-targeting guide sequence portion
  source 1..21: mol_type = other RNA
tccagttcaggaacagtaaac

SEQ ID NO: 11440 - RNA, 21 nt, synthetic construct
  misc_feature 1..21: note = HBV-targeting guide sequence portion
  source 1..21: mol_type = other RNA
tccagttggcagcacagccta

SEQ ID NO: 11441 - RNA, 21 nt, synthetic construct
  misc_feature 1..21: note = HBV-targeting guide sequence portion
  source 1..21: mol_type = other RNA
tccatactgcggaactcctag

SEQ ID NO: 11442 - RNA, 21 nt, synthetic construct
  misc_feature 1..21: note = HBV-targeting guide sequence portion
  source 1..21: mol_type = other RNA
tccatagagtgtgtaaatagt

SEQ ID NO: 11443 - RNA, 21 nt, synthetic construct
  misc_feature 1..21: note = HBV-targeting guide sequence portion
  source 1..21: mol_type = other RNA
tccatataactgaaagccaaa

SEQ ID NO: 11444 - RNA, 21 nt, synthetic construct
  misc_feature 1..21: note = HBV-targeting guide sequence portion
  source 1..21: mol_type = other RNA
tccatccgaaggttttgtaca

SEQ ID NO: 11445 - RNA, 21 nt, synthetic construct
  misc_feature 1..21: note = HBV-targeting guide sequence portion
  source 1..21: mol_type = other RNA
tccatgccctaaagccaccca

SEQ ID NO: 11446 - RNA, 21 nt, synthetic construct
  misc_feature 1..21: note = HBV-targeting guide sequence portion
  source 1..21: mol_type = other RNA
tccatgcgacgtgcagaggtg

SEQ ID NO: 11447 - RNA, 21 nt, synthetic construct
  misc_feature 1..21: note = HBV-targeting guide sequence portion
  source 1..21: mol_type = other RNA
tccatgttcagcgcagggtcc

SEQ ID NO: 11448 - RNA, 21 nt, synthetic construct
  misc_feature 1..21: note = HBV-targeting guide sequence portion
  source 1..21: mol_type = other RNA
tcccaacaaggatccctggcc

SEQ ID NO: 11449 - RNA, 21 nt, synthetic construct
  misc_feature 1..21: note = HBV-targeting guide sequence portion
  source 1..21: mol_type = other RNA
tcccaagaatatggtgaccca

SEQ ID NO: 11450 - RNA, 21 nt, synthetic construct
  misc_feature 1..21: note = HBV-targeting guide sequence portion
  source 1..21: mol_type = other RNA
tcccaatctggattgttggag

SEQ ID NO: 11451 - RNA, 21 nt, synthetic construct
  misc_feature 1..21: note = HBV-targeting guide sequence portion
  source 1..21: mol_type = other RNA
tcccaccttatgagtccaagg

SEQ ID NO: 11452 - RNA, 21 nt, synthetic construct
  misc_feature 1..21: note = HBV-targeting guide sequence portion
  source 1..21: mol_type = other RNA
tcccagaggattgctggtgga

SEQ ID NO: 11453 - RNA, 21 nt, synthetic construct
  misc_feature 1..21: note = HBV-targeting guide sequence portion
  source 1..21: mol_type = other RNA
tcccagagtgagaggcctgta

SEQ ID NO: 11454 - RNA, 21 nt, synthetic construct
  misc_feature 1..21: note = HBV-targeting guide sequence portion
  source 1..21: mol_type = other RNA
tcccagtctttaaacaaacag

SEQ ID NO: 11455 - RNA, 21 nt, synthetic construct
  misc_feature 1..21: note = HBV-targeting guide sequence portion
  source 1..21: mol_type = other RNA
tcccataggaattttccgaaa

SEQ ID NO: 11456 - RNA, 21 nt, synthetic construct
  misc_feature 1..21: note = HBV-targeting guide sequence portion
  source 1..21: mol_type = other RNA
tcccatcatcctgggctttcg

SEQ ID NO: 11457 - RNA, 21 nt, synthetic construct
  misc_feature 1..21: note = HBV-targeting guide sequence portion
  source 1..21: mol_type = other RNA
tcccatcccatcatcctgggc

SEQ ID NO: 11458 - RNA, 21 nt, synthetic construct
  misc_feature 1..21: note = HBV-targeting guide sequence portion
  source 1..21: mol_type = other RNA
tcccatggctgctaggctgtg

SEQ ID NO: 11459 - RNA, 21 nt, synthetic construct
  misc_feature 1..21: note = HBV-targeting guide sequence portion
  source 1..21: mol_type = other RNA
tccccaacaatcaatgacata

SEQ ID NO: 11460 - RNA, 21 nt, synthetic construct
  misc_feature 1..21: note = HBV-targeting guide sequence portion
  source 1..21: mol_type = other RNA
tccccaacctccaatcactca

SEQ ID NO: 11461 - RNA, 21 nt, synthetic construct
  misc_feature 1..21: note = HBV-targeting guide sequence portion
  source 1..21: mol_type = other RNA
tccccaatcctcgagaagatt

SEQ ID NO: 11462 - RNA, 21 nt, synthetic construct
  misc_feature 1..21: note = HBV-targeting guide sequence portion
  source 1..21: mol_type = other RNA
tccccagcaaagaattgcttg

SEQ ID NO: 11463 - RNA, 21 nt, synthetic construct
  misc_feature 1..21: note = HBV-targeting guide sequence portion
  source 1..21: mol_type = other RNA
tcccccaactcctcccagtct

SEQ ID NO: 11464 - RNA, 21 nt, synthetic construct
  misc_feature 1..21: note = HBV-targeting guide sequence portion
  source 1..21: mol_type = other RNA
tcccccactgtttggctttca

SEQ ID NO: 11465 - RNA, 21 nt, synthetic construct
  misc_feature 1..21: note = HBV-targeting guide sequence portion
  source 1..21: mol_type = other RNA
tccccctagaaaattgagaga

SEQ ID NO: 11466 - RNA, 21 nt, synthetic construct
  misc_feature 1..21: note = HBV-targeting guide sequence portion
  source 1..21: mol_type = other RNA
tccccgagattgagatcttct

SEQ ID NO: 11467 - RNA, 21 nt, synthetic construct
  misc_feature 1..21: note = HBV-targeting guide sequence portion
  source 1..21: mol_type = other RNA
tccccgtctgtgccttctcat

SEQ ID NO: 11468 - RNA, 21 nt, synthetic construct
  misc_feature 1..21: note = HBV-targeting guide sequence portion
  source 1..21: mol_type = other RNA
tcccctagaagaagaactccc

SEQ ID NO: 11469 - RNA, 21 nt, synthetic construct
  misc_feature 1..21: note = HBV-targeting guide sequence portion
  source 1..21: mol_type = other RNA
tcccgaccaccagttggaccc

SEQ ID NO: 11470 - RNA, 21 nt, synthetic construct
  misc_feature 1..21: note = HBV-targeting guide sequence portion
  source 1..21: mol_type = other RNA
tcccgagaatgtttgctccag

SEQ ID NO: 11471 - RNA, 21 nt, synthetic construct
  misc_feature 1..21: note = HBV-targeting guide sequence portion
  source 1..21: mol_type = other RNA
tcccgatacagagctgcggcg

SEQ ID NO: 11472 - RNA, 21 nt, synthetic construct
  misc_feature 1..21: note = HBV-targeting guide sequence portion
  source 1..21: mol_type = other RNA
tcccgcaaatatacatcgttc

SEQ ID NO: 11473 - RNA, 21 nt, synthetic construct
  misc_feature 1..21: note = HBV-targeting guide sequence portion
  source 1..21: mol_type = other RNA
tcccgcgcaggatccagttgg

SEQ ID NO: 11474 - RNA, 21 nt, synthetic construct
  misc_feature 1..21: note = HBV-targeting guide sequence portion
  source 1..21: mol_type = other RNA
tcccgcggacgacccatctcg

SEQ ID NO: 11475 - RNA, 21 nt, synthetic construct
  misc_feature 1..21: note = HBV-targeting guide sequence portion
  source 1..21: mol_type = other RNA
tcccggttaacaggcctattg

SEQ ID NO: 11476 - RNA, 21 nt, synthetic construct
  misc_feature 1..21: note = HBV-targeting guide sequence portion
  source 1..21: mol_type = other RNA
tcccgtcggcgctgaatcccg

SEQ ID NO: 11477 - RNA, 21 nt, synthetic construct
  misc_feature 1..21: note = HBV-targeting guide sequence portion
  source 1..21: mol_type = other RNA
tcccgtctgtcctctaattcc

SEQ ID NO: 11478 - RNA, 21 nt, synthetic construct
  misc_feature 1..21: note = HBV-targeting guide sequence portion
  source 1..21: mol_type = other RNA
tcccgtgctggtggttgatga

SEQ ID NO: 11479 - RNA, 21 nt, synthetic construct
  misc_feature 1..21: note = HBV-targeting guide sequence portion
  source 1..21: mol_type = other RNA
tccctagatgcttgatcttct

SEQ ID NO: 11480 - RNA, 21 nt, synthetic construct
  misc_feature 1..21: note = HBV-targeting guide sequence portion
  source 1..21: mol_type = other RNA
tccctcctgttgctgtacaaa

SEQ ID NO: 11481 - RNA, 21 nt, synthetic construct
  misc_feature 1..21: note = HBV-targeting guide sequence portion
  source 1..21: mol_type = other RNA
tccctcgcctcgcagacgaag

SEQ ID NO: 11482 - RNA, 21 nt, synthetic construct
  misc_feature 1..21: note = HBV-targeting guide sequence portion
  source 1..21: mol_type = other RNA
tccctgctggtggctccagtt

SEQ ID NO: 11483 - RNA, 21 nt, synthetic construct
  misc_feature 1..21: note = HBV-targeting guide sequence portion
  source 1..21: mol_type = other RNA
tccctggccagacgccaacaa

SEQ ID NO: 11484 - RNA, 21 nt, synthetic construct
  misc_feature 1..21: note = HBV-targeting guide sequence portion
  source 1..21: mol_type = other RNA
tcccttggactcataaggtgg

SEQ ID NO: 11485 - RNA, 21 nt, synthetic construct
  misc_feature 1..21: note = HBV-targeting guide sequence portion
  source 1..21: mol_type = other RNA
tccctttataccgctgttacc

SEQ ID NO: 11486 - RNA, 21 nt, synthetic construct
  misc_feature 1..21: note = HBV-targeting guide sequence portion
  source 1..21: mol_type = other RNA
tccgaaagcccaggatgatgg

SEQ ID NO: 11487 - RNA, 21 nt, synthetic construct
  misc_feature 1..21: note = HBV-targeting guide sequence portion
  source 1..21: mol_type = other RNA
tccgaaggttttgtacagcaa

SEQ ID NO: 11488 - RNA, 21 nt, synthetic construct
  misc_feature 1..21: note = HBV-targeting guide sequence portion
  source 1..21: mol_type = other RNA
tccgaccgaccacggggcgca

SEQ ID NO: 11489 - RNA, 21 nt, synthetic construct
  misc_feature 1..21: note = HBV-targeting guide sequence portion
  source 1..21: mol_type = other RNA
tccgactactgcctctcacat

SEQ ID NO: 11490 - RNA, 21 nt, synthetic construct
  misc_feature 1..21: note = HBV-targeting guide sequence portion
  source 1..21: mol_type = other RNA
tccgcagtatggatcggcaga

SEQ ID NO: 11491 - RNA, 21 nt, synthetic construct
  misc_feature 1..21: note = HBV-targeting guide sequence portion
  source 1..21: mol_type = other RNA
tccgcctcctgcctctaccaa

SEQ ID NO: 11492 - RNA, 21 nt, synthetic construct
  misc_feature 1..21: note = HBV-targeting guide sequence portion
  source 1..21: mol_type = other RNA
tccgcgggattcagcgccgac

SEQ ID NO: 11493 - RNA, 21 nt, synthetic construct
  misc_feature 1..21: note = HBV-targeting guide sequence portion
  source 1..21: mol_type = other RNA
tccgcgtaaagagaggtgcgc

SEQ ID NO: 11494 - RNA, 21 nt, synthetic construct
  misc_feature 1..21: note = HBV-targeting guide sequence portion
  source 1..21: mol_type = other RNA
tccggaagtgttgataggata

SEQ ID NO: 11495 - RNA, 21 nt, synthetic construct
  misc_feature 1..21: note = HBV-targeting guide sequence portion
  source 1..21: mol_type = other RNA
tccggagacttgtgttgttag

SEQ ID NO: 11496 - RNA, 21 nt, synthetic construct
  misc_feature 1..21: note = HBV-targeting guide sequence portion
  source 1..21: mol_type = other RNA
tccggcagatgagaaggcaca

SEQ ID NO: 11497 - RNA, 21 nt, synthetic construct
  misc_feature 1..21: note = HBV-targeting guide sequence portion
  source 1..21: mol_type = other RNA
tccggctcctctgccgatcca

SEQ ID NO: 11498 - RNA, 21 nt, synthetic construct
  misc_feature 1..21: note = HBV-targeting guide sequence portion
  source 1..21: mol_type = other RNA
tccgtacgagatcttctagat

SEQ ID NO: 11499 - RNA, 21 nt, synthetic construct
  misc_feature 1..21: note = HBV-targeting guide sequence portion
  source 1..21: mol_type = other RNA
tccgtgcggtggggtgaaccc

SEQ ID NO: 11500 - RNA, 21 nt, synthetic construct
  misc_feature 1..21: note = HBV-targeting guide sequence portion
  source 1..21: mol_type = other RNA
tcctaaattcaccaaatactt

SEQ ID NO: 11501 - RNA, 21 nt, synthetic construct
  misc_feature 1..21: note = HBV-targeting guide sequence portion
  source 1..21: mol_type = other RNA
tcctaatatacatctacacca

SEQ ID NO: 11502 - RNA, 21 nt, synthetic construct
  misc_feature 1..21: note = HBV-targeting guide sequence portion
  source 1..21: mol_type = other RNA
tcctaccttgttggcgtctgg

SEQ ID NO: 11503 - RNA, 21 nt, synthetic construct
  misc_feature 1..21: note = HBV-targeting guide sequence portion
  source 1..21: mol_type = other RNA
tcctactgttcaagcctccaa

SEQ ID NO: 11504 - RNA, 21 nt, synthetic construct
  misc_feature 1..21: note = HBV-targeting guide sequence portion
  source 1..21: mol_type = other RNA
tcctagagtatttggtgtctt

SEQ ID NO: 11505 - RNA, 21 nt, synthetic construct
  misc_feature 1..21: note = HBV-targeting guide sequence portion
  source 1..21: mol_type = other RNA
tcctagccgcttgttttgctc

SEQ ID NO: 11506 - RNA, 21 nt, synthetic construct
  misc_feature 1..21: note = HBV-targeting guide sequence portion
  source 1..21: mol_type = other RNA
tcctaggaatcctgatgtgat

SEQ ID NO: 11507 - RNA, 21 nt, synthetic construct
  misc_feature 1..21: note = HBV-targeting guide sequence portion
  source 1..21: mol_type = other RNA
tcctaggacccctgctcgtgt

SEQ ID NO: 11508 - RNA, 21 nt, synthetic construct
  misc_feature 1..21: note = HBV-targeting guide sequence portion
  source 1..21: mol_type = other RNA
tcctagtacaaagatcattaa

SEQ ID NO: 11509 - RNA, 21 nt, synthetic construct
  misc_feature 1..21: note = HBV-targeting guide sequence portion
  source 1..21: mol_type = other RNA
tcctatcaacacttccggaga

SEQ ID NO: 11510 - RNA, 21 nt, synthetic construct
  misc_feature 1..21: note = HBV-targeting guide sequence portion
  source 1..21: mol_type = other RNA
tcctatgggagtgggcctcag

SEQ ID NO: 11511 - RNA, 21 nt, synthetic construct
  misc_feature 1..21: note = HBV-targeting guide sequence portion
  source 1..21: mol_type = other RNA
tcctcacaataccgcagagtc

SEQ ID NO: 11512 - RNA, 21 nt, synthetic construct
  misc_feature 1..21: note = HBV-targeting guide sequence portion
  source 1..21: mol_type = other RNA
tcctccaacttgtcctggtta

SEQ ID NO: 11513 - RNA, 21 nt, synthetic construct
  misc_feature 1..21: note = HBV-targeting guide sequence portion
  source 1..21: mol_type = other RNA
tcctccagcttatagaccacc

SEQ ID NO: 11514 - RNA, 21 nt, synthetic construct
  misc_feature 1..21: note = HBV-targeting guide sequence portion
  source 1..21: mol_type = other RNA
tcctcccagtctttaaacaaa

SEQ ID NO: 11515 - RNA, 21 nt, synthetic construct
  misc_feature 1..21: note = HBV-targeting guide sequence portion
  source 1..21: mol_type = other RNA
tcctcccccaactcctcccag

SEQ ID NO: 11516 - RNA, 21 nt, synthetic construct
  misc_feature 1..21: note = HBV-targeting guide sequence portion
  source 1..21: mol_type = other RNA
tcctcgagaagattgacgata

SEQ ID NO: 11517 - RNA, 21 nt, synthetic construct
  misc_feature 1..21: note = HBV-targeting guide sequence portion
  source 1..21: mol_type = other RNA
tcctctaattccaggatcatc

SEQ ID NO: 11518 - RNA, 21 nt, synthetic construct
  misc_feature 1..21: note = HBV-targeting guide sequence portion
  source 1..21: mol_type = other RNA
tcctctcccgcaaatatacat

SEQ ID NO: 11519 - RNA, 21 nt, synthetic construct
  misc_feature 1..21: note = HBV-targeting guide sequence portion
  source 1..21: mol_type = other RNA
tcctctgccgatccatactgc

SEQ ID NO: 11520 - RNA, 21 nt, synthetic construct
  misc_feature 1..21: note = HBV-targeting guide sequence portion
  source 1..21: mol_type = other RNA
tcctctgggattctttcccga

SEQ ID NO: 11521 - RNA, 21 nt, synthetic construct
  misc_feature 1..21: note = HBV-targeting guide sequence portion
  source 1..21: mol_type = other RNA
tcctcttatgtaagaccttgg

SEQ ID NO: 11522 - RNA, 21 nt, synthetic construct
  misc_feature 1..21: note = HBV-targeting guide sequence portion
  source 1..21: mol_type = other RNA
tcctcttcatcctgctgctat

SEQ ID NO: 11523 - RNA, 21 nt, synthetic construct
  misc_feature 1..21: note = HBV-targeting guide sequence portion
  source 1..21: mol_type = other RNA
tcctcttctctgcctgccgtt

SEQ ID NO: 11524 - RNA, 21 nt, synthetic construct
  misc_feature 1..21: note = HBV-targeting guide sequence portion
  source 1..21: mol_type = other RNA
tcctgaactggagccaccagc

SEQ ID NO: 11525 - RNA, 21 nt, synthetic construct
  misc_feature 1..21: note = HBV-targeting guide sequence portion
  source 1..21: mol_type = other RNA
tcctgactggcgattggtaga

SEQ ID NO: 11526 - RNA, 21 nt, synthetic construct
  misc_feature 1..21: note = HBV-targeting guide sequence portion
  source 1..21: mol_type = other RNA
tcctgagcattgttcacctca

SEQ ID NO: 11527 - RNA, 21 nt, synthetic construct
  misc_feature 1..21: note = HBV-targeting guide sequence portion
  source 1..21: mol_type = other RNA
tcctgatgtgatgttctccat

SEQ ID NO: 11528 - RNA, 21 nt, synthetic construct
  misc_feature 1..21: note = HBV-targeting guide sequence portion
  source 1..21: mol_type = other RNA
tcctgcctctaccaatcgcca

SEQ ID NO: 11529 - RNA, 21 nt, synthetic construct
  misc_feature 1..21: note = HBV-targeting guide sequence portion
  source 1..21: mol_type = other RNA
tcctgcgcgggacgtcctttg

SEQ ID NO: 11530 - RNA, 21 nt, synthetic construct
  misc_feature 1..21: note = HBV-targeting guide sequence portion
  source 1..21: mol_type = other RNA
tcctgctcaaggaacctctat

SEQ ID NO: 11531 - RNA, 21 nt, synthetic construct
  misc_feature 1..21: note = HBV-targeting guide sequence portion
  source 1..21: mol_type = other RNA
tcctgctgctatgcctcatct

SEQ ID NO: 11532 - RNA, 21 nt, synthetic construct
  misc_feature 1..21: note = HBV-targeting guide sequence portion
  source 1..21: mol_type = other RNA
tcctgctttaatgcccttgta

SEQ ID NO: 11533 - RNA, 21 nt, synthetic construct
  misc_feature 1..21: note = HBV-targeting guide sequence portion
  source 1..21: mol_type = other RNA
tcctggaattagaggacagac

SEQ ID NO: 11534 - RNA, 21 nt, synthetic construct
  misc_feature 1..21: note = HBV-targeting guide sequence portion
  source 1..21: mol_type = other RNA
tcctgggctttcggaaaattc

SEQ ID NO: 11535 - RNA, 21 nt, synthetic construct
  misc_feature 1..21: note = HBV-targeting guide sequence portion
  source 1..21: mol_type = other RNA
tcctggttatcgctggatgtg

SEQ ID NO: 11536 - RNA, 21 nt, synthetic construct
  misc_feature 1..21: note = HBV-targeting guide sequence portion
  source 1..21: mol_type = other RNA
tcctgtcctccaacttgtcct

SEQ ID NO: 11537 - RNA, 21 nt, synthetic construct
  misc_feature 1..21: note = HBV-targeting guide sequence portion
  source 1..21: mol_type = other RNA
tcctgttgctgtacaaaacct

SEQ ID NO: 11538 - RNA, 21 nt, synthetic construct
  misc_feature 1..21: note = HBV-targeting guide sequence portion
  source 1..21: mol_type = other RNA
tccttccgtacgagatcttct

SEQ ID NO: 11539 - RNA, 21 nt, synthetic construct
  misc_feature 1..21: note = HBV-targeting guide sequence portion
  source 1..21: mol_type = other RNA
tccttgagcaggagtcgtgca

SEQ ID NO: 11540 - RNA, 21 nt, synthetic construct
  misc_feature 1..21: note = HBV-targeting guide sequence portion
  source 1..21: mol_type = other RNA
tccttgttgacaagaatcctc

SEQ ID NO: 11541 - RNA, 21 nt, synthetic construct
  misc_feature 1..21: note = HBV-targeting guide sequence portion
  source 1..21: mol_type = other RNA
tccttgttgggattgaagtcc

SEQ ID NO: 11542 - RNA, 21 nt, synthetic construct
  misc_feature 1..21: note = HBV-targeting guide sequence portion
  source 1..21: mol_type = other RNA
tcctttgtttacgtcccgtcg

SEQ ID NO: 11543 - RNA, 21 nt, synthetic construct
  misc_feature 1..21: note = HBV-targeting guide sequence portion
  source 1..21: mol_type = other RNA
tcgagaagattgacgatatgt

SEQ ID NO: 11544 - RNA, 21 nt, synthetic construct
  misc_feature 1..21: note = HBV-targeting guide sequence portion
  source 1..21: mol_type = other RNA
tcgagatgggtcgtccgcggg

SEQ ID NO: 11545 - RNA, 21 nt, synthetic construct
  misc_feature 1..21: note = HBV-targeting guide sequence portion
  source 1..21: mol_type = other RNA
tcgaggattggggaccctgcg

SEQ ID NO: 11546 - RNA, 21 nt, synthetic construct
  misc_feature 1..21: note = HBV-targeting guide sequence portion
  source 1..21: mol_type = other RNA
tcgaggccgcttggggccctg

SEQ ID NO: 11547 - RNA, 21 nt, synthetic construct
  misc_feature 1..21: note = HBV-targeting guide sequence portion
  source 1..21: mol_type = other RNA
tcgcactcctccagcttatag

SEQ ID NO: 11548 - RNA, 21 nt, synthetic construct
  misc_feature 1..21: note = HBV-targeting guide sequence portion
  source 1..21: mol_type = other RNA
tcgcagaagatctcaatctcg

SEQ ID NO: 11549 - RNA, 21 nt, synthetic construct
  misc_feature 1..21: note = HBV-targeting guide sequence portion
  source 1..21: mol_type = other RNA
tcgcagacgaagatctcaatc

SEQ ID NO: 11550 - RNA, 21 nt, synthetic construct
  misc_feature 1..21: note = HBV-targeting guide sequence portion
  source 1..21: mol_type = other RNA
tcgcagccggtctggagcaaa

SEQ ID NO: 11551 - RNA, 21 nt, synthetic construct
  misc_feature 1..21: note = HBV-targeting guide sequence portion
  source 1..21: mol_type = other RNA
tcgcagtccccaacctccaat

SEQ ID NO: 11552 - RNA, 21 nt, synthetic construct
  misc_feature 1..21: note = HBV-targeting guide sequence portion
  source 1..21: mol_type = other RNA
tcgcatggagaccaccgtgaa

SEQ ID NO: 11553 - RNA, 21 nt, synthetic construct
  misc_feature 1..21: note = HBV-targeting guide sequence portion
  source 1..21: mol_type = other RNA
tcgccaacttacaaggccttt

SEQ ID NO: 11554 - RNA, 21 nt, synthetic construct
  misc_feature 1..21: note = HBV-targeting guide sequence portion
  source 1..21: mol_type = other RNA
tcgccagtcaggacggcagcc

SEQ ID NO: 11555 - RNA, 21 nt, synthetic construct
  misc_feature 1..21: note = HBV-targeting guide sequence portion
  source 1..21: mol_type = other RNA
tcgccgcgtcgcagaagatct

SEQ ID NO: 11556 - RNA, 21 nt, synthetic construct
  misc_feature 1..21: note = HBV-targeting guide sequence portion
  source 1..21: mol_type = other RNA
tcgcctcgcagacgaagatct

SEQ ID NO: 11557 - RNA, 21 nt, synthetic construct
  misc_feature 1..21: note = HBV-targeting guide sequence portion
  source 1..21: mol_type = other RNA
tcgctggatgtgtctgcggcg

SEQ ID NO: 11558 - RNA, 21 nt, synthetic construct
  misc_feature 1..21: note = HBV-targeting guide sequence portion
  source 1..21: mol_type = other RNA
tcgcttcacctctgcacgtcg

SEQ ID NO: 11559 - RNA, 21 nt, synthetic construct
  misc_feature 1..21: note = HBV-targeting guide sequence portion
  source 1..21: mol_type = other RNA
tcggaaaattcctatgggagt

SEQ ID NO: 11560 - RNA, 21 nt, synthetic construct
  misc_feature 1..21: note = HBV-targeting guide sequence portion
  source 1..21: mol_type = other RNA
tcggaacagggtttactgttc

SEQ ID NO: 11561 - RNA, 21 nt, synthetic construct
  misc_feature 1..21: note = HBV-targeting guide sequence portion
  source 1..21: mol_type = other RNA
tcggaacggcaggcagagaag

SEQ ID NO: 11562 - RNA, 21 nt, synthetic construct
  misc_feature 1..21: note = HBV-targeting guide sequence portion
  source 1..21: mol_type = other RNA
tcggatggaaactgcacctgt

SEQ ID NO: 11563 - RNA, 21 nt, synthetic construct
  misc_feature 1..21: note = HBV-targeting guide sequence portion
  source 1..21: mol_type = other RNA
tcggcagaggagccggaaagg

SEQ ID NO: 11564 - RNA, 21 nt, synthetic construct
  misc_feature 1..21: note = HBV-targeting guide sequence portion
  source 1..21: mol_type = other RNA
tcggcgctgaatcccgcggac

SEQ ID NO: 11565 - RNA, 21 nt, synthetic construct
  misc_feature 1..21: note = HBV-targeting guide sequence portion
  source 1..21: mol_type = other RNA
tcgggaaagaatcccagagga

SEQ ID NO: 11566 - RNA, 21 nt, synthetic construct
  misc_feature 1..21: note = HBV-targeting guide sequence portion
  source 1..21: mol_type = other RNA
tcgggactgacaactctgttg

SEQ ID NO: 11567 - RNA, 21 nt, synthetic construct
  misc_feature 1..21: note = HBV-targeting guide sequence portion
  source 1..21: mol_type = other RNA
tcgggatgccttggagtctcc

SEQ ID NO: 11568 - RNA, 21 nt, synthetic construct
  misc_feature 1..21: note = HBV-targeting guide sequence portion
  source 1..21: mol_type = other RNA
tcgggctagggttcaccccac

SEQ ID NO: 11569 - RNA, 21 nt, synthetic construct
  misc_feature 1..21: note = HBV-targeting guide sequence portion
  source 1..21: mol_type = other RNA
tcggggatctcaatgttagta

SEQ ID NO: 11570 - RNA, 21 nt, synthetic construct
  misc_feature 1..21: note = HBV-targeting guide sequence portion
  source 1..21: mol_type = other RNA
tcggtcggaacggcaggcaga

SEQ ID NO: 11571 - RNA, 21 nt, synthetic construct
  misc_feature 1..21: note = HBV-targeting guide sequence portion
  source 1..21: mol_type = other RNA
tcggtcgttgacattgcagag

SEQ ID NO: 11572 - RNA, 21 nt, synthetic construct
  misc_feature 1..21: note = HBV-targeting guide sequence portion
  source 1..21: mol_type = other RNA
tcgtacggaaggaaagaagtc

SEQ ID NO: 11573 - RNA, 21 nt, synthetic construct
  misc_feature 1..21: note = HBV-targeting guide sequence portion
  source 1..21: mol_type = other RNA
tcgtagggctttcccccactg

SEQ ID NO: 11574 - RNA, 21 nt, synthetic construct
  misc_feature 1..21: note = HBV-targeting guide sequence portion
  source 1..21: mol_type = other RNA
tcgtcaatcttctcgaggatt

SEQ ID NO: 11575 - RNA, 21 nt, synthetic construct
  misc_feature 1..21: note = HBV-targeting guide sequence portion
  source 1..21: mol_type = other RNA
tcgtccgcgggattcagcgcc

SEQ ID NO: 11576 - RNA, 21 nt, synthetic construct
  misc_feature 1..21: note = HBV-targeting guide sequence portion
  source 1..21: mol_type = other RNA
tcgtcctcttctctgcctgcc

SEQ ID NO: 11577 - RNA, 21 nt, synthetic construct
  misc_feature 1..21: note = HBV-targeting guide sequence portion
  source 1..21: mol_type = other RNA
tcgtcgtctaacaacacaagt

SEQ ID NO: 11578 - RNA, 21 nt, synthetic construct
  misc_feature 1..21: note = HBV-targeting guide sequence portion
  source 1..21: mol_type = other RNA
tcgtctaacaacacaagtctc

SEQ ID NO: 11579 - RNA, 21 nt, synthetic construct
  misc_feature 1..21: note = HBV-targeting guide sequence portion
  source 1..21: mol_type = other RNA
tcgtctgcgaggcgagggagt

SEQ ID NO: 11580 - RNA, 21 nt, synthetic construct
  misc_feature 1..21: note = HBV-targeting guide sequence portion
  source 1..21: mol_type = other RNA
tcgtgcaggttctgcagggtc

SEQ ID NO: 11581 - RNA, 21 nt, synthetic construct
  misc_feature 1..21: note = HBV-targeting guide sequence portion
  source 1..21: mol_type = other RNA
tcgtggtggacttctctcaat

SEQ ID NO: 11582 - RNA, 21 nt, synthetic construct
  misc_feature 1..21: note = HBV-targeting guide sequence portion
  source 1..21: mol_type = other RNA
tcgtgttacaggcggggtttt

SEQ ID NO: 11583 - RNA, 21 nt, synthetic construct
  misc_feature 1..21: note = HBV-targeting guide sequence portion
  source 1..21: mol_type = other RNA
tcgttcccatggctgctaggc

SEQ ID NO: 11584 - RNA, 21 nt, synthetic construct
  misc_feature 1..21: note = HBV-targeting guide sequence portion
  source 1..21: mol_type = other RNA
tcgttgacacactttccaatc

SEQ ID NO: 11585 - RNA, 21 nt, synthetic construct
  misc_feature 1..21: note = HBV-targeting guide sequence portion
  source 1..21: mol_type = other RNA
tcgttgacattgcagagagtc

SEQ ID NO: 11586 - RNA, 21 nt, synthetic construct
  misc_feature 1..21: note = HBV-targeting guide sequence portion
  source 1..21: mol_type = other RNA
tcgtttttgccttctgacttc

SEQ ID NO: 11587 - RNA, 21 nt, synthetic construct
  misc_feature 1..21: note = HBV-targeting guide sequence portion
  source 1..21: mol_type = other RNA
tctaaattagtacccacccag

SEQ ID NO: 11588 - RNA, 21 nt, synthetic construct
  misc_feature 1..21: note = HBV-targeting guide sequence portion
  source 1..21: mol_type = other RNA
tctaacaacacaagtctccgg

SEQ ID NO: 11589 - RNA, 21 nt, synthetic construct
  misc_feature 1..21: note = HBV-targeting guide sequence portion
  source 1..21: mol_type = other RNA
tctaagcaggctttcactttt

SEQ ID NO: 11590 - RNA, 21 nt, synthetic construct
  misc_feature 1..21: note = HBV-targeting guide sequence portion
  source 1..21: mol_type = other RNA
tctaatctcctcccccaactc

SEQ ID NO: 11591 - RNA, 21 nt, synthetic construct
  misc_feature 1..21: note = HBV-targeting guide sequence portion
  source 1..21: mol_type = other RNA
tctaattccaggatcatcaac

SEQ ID NO: 11592 - RNA, 21 nt, synthetic construct
  misc_feature 1..21: note = HBV-targeting guide sequence portion
  source 1..21: mol_type = other RNA
tctacaccaagatattatcaa

SEQ ID NO: 11593 - RNA, 21 nt, synthetic construct
  misc_feature 1..21: note = HBV-targeting guide sequence portion
  source 1..21: mol_type = other RNA
tctaccaatcgccagtcagga

SEQ ID NO: 11594 - RNA, 21 nt, synthetic construct
  misc_feature 1..21: note = HBV-targeting guide sequence portion
  source 1..21: mol_type = other RNA
tctactgtacctgtctttaac

SEQ ID NO: 11595 - RNA, 21 nt, synthetic construct
  misc_feature 1..21: note = HBV-targeting guide sequence portion
  source 1..21: mol_type = other RNA
tctagaagatctcgtacggaa

SEQ ID NO: 11596 - RNA, 21 nt, synthetic construct
  misc_feature 1..21: note = HBV-targeting guide sequence portion
  source 1..21: mol_type = other RNA
tctagactcgtggtggacttc

SEQ ID NO: 11597 - RNA, 21 nt, synthetic construct
  misc_feature 1..21: note = HBV-targeting guide sequence portion
  source 1..21: mol_type = other RNA
tctagactctgcggtattgtg

SEQ ID NO: 11598 - RNA, 21 nt, synthetic construct
  misc_feature 1..21: note = HBV-targeting guide sequence portion
  source 1..21: mol_type = other RNA
tctagataccgccgcagctct

SEQ ID NO: 11599 - RNA, 21 nt, synthetic construct
  misc_feature 1..21: note = HBV-targeting guide sequence portion
  source 1..21: mol_type = other RNA
tctagctacctgggtgggtac

SEQ ID NO: 11600 - RNA, 21 nt, synthetic construct
  misc_feature 1..21: note = HBV-targeting guide sequence portion
  source 1..21: mol_type = other RNA
tctaggaccgtttctcttcca

SEQ ID NO: 11601 - RNA, 21 nt, synthetic construct
  misc_feature 1..21: note = HBV-targeting guide sequence portion
  source 1..21: mol_type = other RNA
tctagggacctagtagtcagt

SEQ ID NO: 11602 - RNA, 21 nt, synthetic construct
  misc_feature 1..21: note = HBV-targeting guide sequence portion
  source 1..21: mol_type = other RNA
tctaggggacctgcctcgtcg

SEQ ID NO: 11603 - RNA, 21 nt, synthetic construct
  misc_feature 1..21: note = HBV-targeting guide sequence portion
  source 1..21: mol_type = other RNA
tctagggggaactaccgtgtg

SEQ ID NO: 11604 - RNA, 21 nt, synthetic construct
  misc_feature 1..21: note = HBV-targeting guide sequence portion
  source 1..21: mol_type = other RNA
tctagttaatcattacttcca

SEQ ID NO: 11605 - RNA, 21 nt, synthetic construct
  misc_feature 1..21: note = HBV-targeting guide sequence portion
  source 1..21: mol_type = other RNA
tctagtttggaagtaatgatt

SEQ ID NO: 11606 - RNA, 21 nt, synthetic construct
  misc_feature 1..21: note = HBV-targeting guide sequence portion
  source 1..21: mol_type = other RNA
tctataagctggaggagtgcg

SEQ ID NO: 11607 - RNA, 21 nt, synthetic construct
  misc_feature 1..21: note = HBV-targeting guide sequence portion
  source 1..21: mol_type = other RNA
tctatggaaggcgggtgtttt

SEQ ID NO: 11608 - RNA, 21 nt, synthetic construct
  misc_feature 1..21: note = HBV-targeting guide sequence portion
  source 1..21: mol_type = other RNA
tctatgtatccctcctgttgc

SEQ ID NO: 11609 - RNA, 21 nt, synthetic construct
  misc_feature 1..21: note = HBV-targeting guide sequence portion
  source 1..21: mol_type = other RNA
tctcaatcgccgcgtcgcaga

SEQ ID NO: 11610 - RNA, 21 nt, synthetic construct
  misc_feature 1..21: note = HBV-targeting guide sequence portion
  source 1..21: mol_type = other RNA
tctcaatctcggggatctcaa

SEQ ID NO: 11611 - RNA, 21 nt, synthetic construct
  misc_feature 1..21: note = HBV-targeting guide sequence portion
  source 1..21: mol_type = other RNA
tctcaatgttagtatcccttg

SEQ ID NO: 11612 - RNA, 21 nt, synthetic construct
  misc_feature 1..21: note = HBV-targeting guide sequence portion
  source 1..21: mol_type = other RNA
tctcaattttctagggggaac

SEQ ID NO: 11613 - RNA, 21 nt, synthetic construct
  misc_feature 1..21: note = HBV-targeting guide sequence portion
  source 1..21: mol_type = other RNA
tctcacatatcgtcaatcttc

SEQ ID NO: 11614 - RNA, 21 nt, synthetic construct
  misc_feature 1..21: note = HBV-targeting guide sequence portion
  source 1..21: mol_type = other RNA
tctcactctgggatcttgcag

SEQ ID NO: 11615 - RNA, 21 nt, synthetic construct
  misc_feature 1..21: note = HBV-targeting guide sequence portion
  source 1..21: mol_type = other RNA
tctcagaggtggagacagcgg

SEQ ID NO: 11616 - RNA, 21 nt, synthetic construct
  misc_feature 1..21: note = HBV-targeting guide sequence portion
  source 1..21: mol_type = other RNA
tctcatctgccggaccgtgtg

SEQ ID NO: 11617 - RNA, 21 nt, synthetic construct
  misc_feature 1..21: note = HBV-targeting guide sequence portion
  source 1..21: mol_type = other RNA
tctcattaactgtaagcgggc

SEQ ID NO: 11618 - RNA, 21 nt, synthetic construct
  misc_feature 1..21: note = HBV-targeting guide sequence portion
  source 1..21: mol_type = other RNA
tctccacctctgagaaacact

SEQ ID NO: 11619 - RNA, 21 nt, synthetic construct
  misc_feature 1..21: note = HBV-targeting guide sequence portion
  source 1..21: mol_type = other RNA
tctccatgcgacgtgcagagg

SEQ ID NO: 11620 - RNA, 21 nt, synthetic construct
  misc_feature 1..21: note = HBV-targeting guide sequence portion
  source 1..21: mol_type = other RNA
tctccatgttcagcgcagggt

SEQ ID NO: 11621 - RNA, 21 nt, synthetic construct
  misc_feature 1..21: note = HBV-targeting guide sequence portion
  source 1..21: mol_type = other RNA
tctccccagcaaagaattgct

SEQ ID NO: 11622 - RNA, 21 nt, synthetic construct
  misc_feature 1..21: note = HBV-targeting guide sequence portion
  source 1..21: mol_type = other RNA
tctcccgcaaatatacatcgt

SEQ ID NO: 11623 - RNA, 21 nt, synthetic construct
  misc_feature 1..21: note = HBV-targeting guide sequence portion
  source 1..21: mol_type = other RNA
tctccctgctggtggctccag

SEQ ID NO: 11624 - RNA, 21 nt, synthetic construct
  misc_feature 1..21: note = HBV-targeting guide sequence portion
  source 1..21: mol_type = other RNA
tctccggaagtgttgatagga

SEQ ID NO: 11625 - RNA, 21 nt, synthetic construct
  misc_feature 1..21: note = HBV-targeting guide sequence portion
  source 1..21: mol_type = other RNA
tctcctcccccaactcctccc

SEQ ID NO: 11626 - RNA, 21 nt, synthetic construct
  misc_feature 1..21: note = HBV-targeting guide sequence portion
  source 1..21: mol_type = other RNA
tctcctgagcattgttcacct

SEQ ID NO: 11627 - RNA, 21 nt, synthetic construct
  misc_feature 1..21: note = HBV-targeting guide sequence portion
  source 1..21: mol_type = other RNA
tctcgaggattggggaccctg

SEQ ID NO: 11628 - RNA, 21 nt, synthetic construct
  misc_feature 1..21: note = HBV-targeting guide sequence portion
  source 1..21: mol_type = other RNA
tctcgaggccgcttggggccc

SEQ ID NO: 11629 - RNA, 21 nt, synthetic construct
  misc_feature 1..21: note = HBV-targeting guide sequence portion
  source 1..21: mol_type = other RNA
tctcgggactgacaactctgt

SEQ ID NO: 11630 - RNA, 21 nt, synthetic construct
  misc_feature 1..21: note = HBV-targeting guide sequence portion
  source 1..21: mol_type = other RNA
tctcggggatctcaatgttag

SEQ ID NO: 11631 - RNA, 21 nt, synthetic construct
  misc_feature 1..21: note = HBV-targeting guide sequence portion
  source 1..21: mol_type = other RNA
tctcgtacggaaggaaagaag

SEQ ID NO: 11632 - RNA, 21 nt, synthetic construct
  misc_feature 1..21: note = HBV-targeting guide sequence portion
  source 1..21: mol_type = other RNA
tctcgtttttgccttctgact

SEQ ID NO: 11633 - RNA, 21 nt, synthetic construct
  misc_feature 1..21: note = HBV-targeting guide sequence portion
  source 1..21: mol_type = other RNA
tctctcaattttctaggggga

SEQ ID NO: 11634 - RNA, 21 nt, synthetic construct
  misc_feature 1..21: note = HBV-targeting guide sequence portion
  source 1..21: mol_type = other RNA
tctctgcaatgtcaacgaccg

SEQ ID NO: 11635 - RNA, 21 nt, synthetic construct
  misc_feature 1..21: note = HBV-targeting guide sequence portion
  source 1..21: mol_type = other RNA
tctctgcctgccgttccgacc

SEQ ID NO: 11636 - RNA, 21 nt, synthetic construct
  misc_feature 1..21: note = HBV-targeting guide sequence portion
  source 1..21: mol_type = other RNA
tctcttaatttcatgggctat

SEQ ID NO: 11637 - RNA, 21 nt, synthetic construct
  misc_feature 1..21: note = HBV-targeting guide sequence portion
  source 1..21: mol_type = other RNA
tctcttatataaaacacccgc

SEQ ID NO: 11638 - RNA, 21 nt, synthetic construct
  misc_feature 1..21: note = HBV-targeting guide sequence portion
  source 1..21: mol_type = other RNA
tctcttccaaaagtaagacaa

SEQ ID NO: 11639 - RNA, 21 nt, synthetic construct
  misc_feature 1..21: note = HBV-targeting guide sequence portion
  source 1..21: mol_type = other RNA
tctcttggctcagtttactag

SEQ ID NO: 11640 - RNA, 21 nt, synthetic construct
  misc_feature 1..21: note = HBV-targeting guide sequence portion
  source 1..21: mol_type = other RNA
tctcttgttcatgtcctactg

SEQ ID NO: 11641 - RNA, 21 nt, synthetic construct
  misc_feature 1..21: note = HBV-targeting guide sequence portion
  source 1..21: mol_type = other RNA
tctctttacgcggactccccg

SEQ ID NO: 11642 - RNA, 21 nt, synthetic construct
  misc_feature 1..21: note = HBV-targeting guide sequence portion
  source 1..21: mol_type = other RNA
tctctttgttttgttagggtt

SEQ ID NO: 11643 - RNA, 21 nt, synthetic construct
  misc_feature 1..21: note = HBV-targeting guide sequence portion
  source 1..21: mol_type = other RNA
tctgaaacattctttgatttt

SEQ ID NO: 11644 - RNA, 21 nt, synthetic construct
  misc_feature 1..21: note = HBV-targeting guide sequence portion
  source 1..21: mol_type = other RNA
tctgaactttaggcccatatg

SEQ ID NO: 11645 - RNA, 21 nt, synthetic construct
  misc_feature 1..21: note = HBV-targeting guide sequence portion
  source 1..21: mol_type = other RNA
tctgaaggctgggtccaactg

SEQ ID NO: 11646 - RNA, 21 nt, synthetic construct
  misc_feature 1..21: note = HBV-targeting guide sequence portion
  source 1..21: mol_type = other RNA
tctgacttctttccttccgta

SEQ ID NO: 11647 - RNA, 21 nt, synthetic construct
  misc_feature 1..21: note = HBV-targeting guide sequence portion
  source 1..21: mol_type = other RNA
tctgagaaacactcatcctca

SEQ ID NO: 11648 - RNA, 21 nt, synthetic construct
  misc_feature 1..21: note = HBV-targeting guide sequence portion
  source 1..21: mol_type = other RNA
tctgcaagatcccagagtgag

SEQ ID NO: 11649 - RNA, 21 nt, synthetic construct
  misc_feature 1..21: note = HBV-targeting guide sequence portion
  source 1..21: mol_type = other RNA
tctgcaatgtcaacgaccgac

SEQ ID NO: 11650 - RNA, 21 nt, synthetic construct
  misc_feature 1..21: note = HBV-targeting guide sequence portion
  source 1..21: mol_type = other RNA
tctgcacgtcgcatggagacc

SEQ ID NO: 11651 - RNA, 21 nt, synthetic construct
  misc_feature 1..21: note = HBV-targeting guide sequence portion
  source 1..21: mol_type = other RNA
tctgcagggtcccgtgctggt

SEQ ID NO: 11652 - RNA, 21 nt, synthetic construct
  misc_feature 1..21: note = HBV-targeting guide sequence portion
  source 1..21: mol_type = other RNA
tctgccccatgctgtagctct

SEQ ID NO: 11653 - RNA, 21 nt, synthetic construct
  misc_feature 1..21: note = HBV-targeting guide sequence portion
  source 1..21: mol_type = other RNA
tctgccgatccatactgcgga

SEQ ID NO: 11654 - RNA, 21 nt, synthetic construct
  misc_feature 1..21: note = HBV-targeting guide sequence portion
  source 1..21: mol_type = other RNA
tctgccggaccgtgtgcactt

SEQ ID NO: 11655 - RNA, 21 nt, synthetic construct
  misc_feature 1..21: note = HBV-targeting guide sequence portion
  source 1..21: mol_type = other RNA
tctgcctaatcatctcttgtt

SEQ ID NO: 11656 - RNA, 21 nt, synthetic construct
  misc_feature 1..21: note = HBV-targeting guide sequence portion
  source 1..21: mol_type = other RNA
tctgcctgccgttccgaccga

SEQ ID NO: 11657 - RNA, 21 nt, synthetic construct
  misc_feature 1..21: note = HBV-targeting guide sequence portion
  source 1..21: mol_type = other RNA
tctgcgacgcggcgattgaga

SEQ ID NO: 11658 - RNA, 21 nt, synthetic construct
  misc_feature 1..21: note = HBV-targeting guide sequence portion
  source 1..21: mol_type = other RNA
tctgcgaggcgagggagttct

SEQ ID NO: 11659 - RNA, 21 nt, synthetic construct
  misc_feature 1..21: note = HBV-targeting guide sequence portion
  source 1..21: mol_type = other RNA
tctgcgcaccagcaccatgca

SEQ ID NO: 11660 - RNA, 21 nt, synthetic construct
  misc_feature 1..21: note = HBV-targeting guide sequence portion
  source 1..21: mol_type = other RNA
tctgcggcgttttatcatctt

SEQ ID NO: 11661 - RNA, 21 nt, synthetic construct
  misc_feature 1..21: note = HBV-targeting guide sequence portion
  source 1..21: mol_type = other RNA
tctgcggtattgtgaggattc

SEQ ID NO: 11662 - RNA, 21 nt, synthetic construct
  misc_feature 1..21: note = HBV-targeting guide sequence portion
  source 1..21: mol_type = other RNA
tctggactatcaaggtatgtt

SEQ ID NO: 11663 - RNA, 21 nt, synthetic construct
  misc_feature 1..21: note = HBV-targeting guide sequence portion
  source 1..21: mol_type = other RNA
tctggagcaaacattctcggg

SEQ ID NO: 11664 - RNA, 21 nt, synthetic construct
  misc_feature 1..21: note = HBV-targeting guide sequence portion
  source 1..21: mol_type = other RNA
tctggataataaggtttaata

SEQ ID NO: 11665 - RNA, 21 nt, synthetic construct
  misc_feature 1..21: note = HBV-targeting guide sequence portion
  source 1..21: mol_type = other RNA
tctggattgttggagtttgct

SEQ ID NO: 11666 - RNA, 21 nt, synthetic construct
  misc_feature 1..21: note = HBV-targeting guide sequence portion
  source 1..21: mol_type = other RNA
tctggccagggatccttgttg

SEQ ID NO: 11667 - RNA, 21 nt, synthetic construct
  misc_feature 1..21: note = HBV-targeting guide sequence portion
  source 1..21: mol_type = other RNA
tctgggatcttgcagagtttg

SEQ ID NO: 11668 - RNA, 21 nt, synthetic construct
  misc_feature 1..21: note = HBV-targeting guide sequence portion
  source 1..21: mol_type = other RNA
tctgggattctttcccgacca

SEQ ID NO: 11669 - RNA, 21 nt, synthetic construct
  misc_feature 1..21: note = HBV-targeting guide sequence portion
  source 1..21: mol_type = other RNA
tctgggttttgctgccccttt

SEQ ID NO: 11670 - RNA, 21 nt, synthetic construct
  misc_feature 1..21: note = HBV-targeting guide sequence portion
  source 1..21: mol_type = other RNA
tctgtacagcatcttgagtcc

SEQ ID NO: 11671 - RNA, 21 nt, synthetic construct
  misc_feature 1..21: note = HBV-targeting guide sequence portion
  source 1..21: mol_type = other RNA
tctgtatcgggatgccttgga

SEQ ID NO: 11672 - RNA, 21 nt, synthetic construct
  misc_feature 1..21: note = HBV-targeting guide sequence portion
  source 1..21: mol_type = other RNA
tctgtcctctaattccaggat

SEQ ID NO: 11673 - RNA, 21 nt, synthetic construct
  misc_feature 1..21: note = HBV-targeting guide sequence portion
  source 1..21: mol_type = other RNA
tctgtgccaagtgtttgctga

SEQ ID NO: 11674 - RNA, 21 nt, synthetic construct
  misc_feature 1..21: note = HBV-targeting guide sequence portion
  source 1..21: mol_type = other RNA
tctgtgccttctcatctgccg

SEQ ID NO: 11675 - RNA, 21 nt, synthetic construct
  misc_feature 1..21: note = HBV-targeting guide sequence portion
  source 1..21: mol_type = other RNA
tctgtgggtcaccatattctt

SEQ ID NO: 11676 - RNA, 21 nt, synthetic construct
  misc_feature 1..21: note = HBV-targeting guide sequence portion
  source 1..21: mol_type = other RNA
tctgtgtaaacaatacctgaa

SEQ ID NO: 11677 - RNA, 21 nt, synthetic construct
  misc_feature 1..21: note = HBV-targeting guide sequence portion
  source 1..21: mol_type = other RNA
tctgttgtcctctcccgcaaa

SEQ ID NO: 11678 - RNA, 21 nt, synthetic construct
  misc_feature 1..21: note = HBV-targeting guide sequence portion
  source 1..21: mol_type = other RNA
tcttaatttcatgggctatgt

SEQ ID NO: 11679 - RNA, 21 nt, synthetic construct
  misc_feature 1..21: note = HBV-targeting guide sequence portion
  source 1..21: mol_type = other RNA
tcttacataagaggactcttg

SEQ ID NO: 11680 - RNA, 21 nt, synthetic construct
  misc_feature 1..21: note = HBV-targeting guide sequence portion
  source 1..21: mol_type = other RNA
tcttacttttggaagagaaac

SEQ ID NO: 11681 - RNA, 21 nt, synthetic construct
  misc_feature 1..21: note = HBV-targeting guide sequence portion
  source 1..21: mol_type = other RNA
tcttatataaaacacccgcct

SEQ ID NO: 11682 - RNA, 21 nt, synthetic construct
  misc_feature 1..21: note = HBV-targeting guide sequence portion
  source 1..21: mol_type = other RNA
tcttatgtaagaccttgggca

SEQ ID NO: 11683 - RNA, 21 nt, synthetic construct
  misc_feature 1..21: note = HBV-targeting guide sequence portion
  source 1..21: mol_type = other RNA
tcttcatcctgctgctatgcc

SEQ ID NO: 11684 - RNA, 21 nt, synthetic construct
  misc_feature 1..21: note = HBV-targeting guide sequence portion
  source 1..21: mol_type = other RNA
tcttccaaaagtaagacaaga

SEQ ID NO: 11685 - RNA, 21 nt, synthetic construct
  misc_feature 1..21: note = HBV-targeting guide sequence portion
  source 1..21: mol_type = other RNA
tcttcctcttcatcctgctgc

SEQ ID NO: 11686 - RNA, 21 nt, synthetic construct
  misc_feature 1..21: note = HBV-targeting guide sequence portion
  source 1..21: mol_type = other RNA
tcttcgtctgcgaggcgaggg

SEQ ID NO: 11687 - RNA, 21 nt, synthetic construct
  misc_feature 1..21: note = HBV-targeting guide sequence portion
  source 1..21: mol_type = other RNA
tcttctaaattagtacccacc

SEQ ID NO: 11688 - RNA, 21 nt, synthetic construct
  misc_feature 1..21: note = HBV-targeting guide sequence portion
  source 1..21: mol_type = other RNA
tcttctactgtacctgtcttt

SEQ ID NO: 11689 - RNA, 21 nt, synthetic construct
  misc_feature 1..21: note = HBV-targeting guide sequence portion
  source 1..21: mol_type = other RNA
tcttctagataccgccgcagc

SEQ ID NO: 11690 - RNA, 21 nt, synthetic construct
  misc_feature 1..21: note = HBV-targeting guide sequence portion
  source 1..21: mol_type = other RNA
tcttctaggggacctgcctcg

SEQ ID NO: 11691 - RNA, 21 nt, synthetic construct
  misc_feature 1..21: note = HBV-targeting guide sequence portion
  source 1..21: mol_type = other RNA
tcttctcgaggattggggacc

SEQ ID NO: 11692 - RNA, 21 nt, synthetic construct
  misc_feature 1..21: note = HBV-targeting guide sequence portion
  source 1..21: mol_type = other RNA
tcttctctgcctgccgttccg

SEQ ID NO: 11693 - RNA, 21 nt, synthetic construct
  misc_feature 1..21: note = HBV-targeting guide sequence portion
  source 1..21: mol_type = other RNA
tcttctgcgacgcggcgattg

SEQ ID NO: 11694 - RNA, 21 nt, synthetic construct
  misc_feature 1..21: note = HBV-targeting guide sequence portion
  source 1..21: mol_type = other RNA
tcttctggactatcaaggtat

SEQ ID NO: 11695 - RNA, 21 nt, synthetic construct
  misc_feature 1..21: note = HBV-targeting guide sequence portion
  source 1..21: mol_type = other RNA
tcttctgggttttgctgcccc

SEQ ID NO: 11696 - RNA, 21 nt, synthetic construct
  misc_feature 1..21: note = HBV-targeting guide sequence portion
  source 1..21: mol_type = other RNA
tcttcttctaggggacctgcc

SEQ ID NO: 11697 - RNA, 21 nt, synthetic construct
  misc_feature 1..21: note = HBV-targeting guide sequence portion
  source 1..21: mol_type = other RNA
tcttcttgttggttcttctgg

SEQ ID NO: 11698 - RNA, 21 nt, synthetic construct
  misc_feature 1..21: note = HBV-targeting guide sequence portion
  source 1..21: mol_type = other RNA
tcttgagtccctttataccgc

SEQ ID NO: 11699 - RNA, 21 nt, synthetic construct
  misc_feature 1..21: note = HBV-targeting guide sequence portion
  source 1..21: mol_type = other RNA
tcttgcagagtttggtggaag

SEQ ID NO: 11700 - RNA, 21 nt, synthetic construct
  misc_feature 1..21: note = HBV-targeting guide sequence portion
  source 1..21: mol_type = other RNA
tcttgcccaaggtcttacata

SEQ ID NO: 11701 - RNA, 21 nt, synthetic construct
  misc_feature 1..21: note = HBV-targeting guide sequence portion
  source 1..21: mol_type = other RNA
tcttggactctctgcaatgtc

SEQ ID NO: 11702 - RNA, 21 nt, synthetic construct
  misc_feature 1..21: note = HBV-targeting guide sequence portion
  source 1..21: mol_type = other RNA
tcttggccaaaattcgcagtc

SEQ ID NO: 11703 - RNA, 21 nt, synthetic construct
  misc_feature 1..21: note = HBV-targeting guide sequence portion
  source 1..21: mol_type = other RNA
tcttggctcagtttactagtg

SEQ ID NO: 11704 - RNA, 21 nt, synthetic construct
  misc_feature 1..21: note = HBV-targeting guide sequence portion
  source 1..21: mol_type = other RNA
tcttgggaacaagagctacag

SEQ ID NO: 11705 - RNA, 21 nt, synthetic construct
  misc_feature 1..21: note = HBV-targeting guide sequence portion
  source 1..21: mol_type = other RNA
tcttggtgtagatgtatatta

SEQ ID NO: 11706 - RNA, 21 nt, synthetic construct
  misc_feature 1..21: note = HBV-targeting guide sequence portion
  source 1..21: mol_type = other RNA
tcttgtcaacaaggaaaaccc

SEQ ID NO: 11707 - RNA, 21 nt, synthetic construct
  misc_feature 1..21: note = HBV-targeting guide sequence portion
  source 1..21: mol_type = other RNA
tcttgtcttacttttggaaga

SEQ ID NO: 11708 - RNA, 21 nt, synthetic construct
  misc_feature 1..21: note = HBV-targeting guide sequence portion
  source 1..21: mol_type = other RNA
tcttgttcatgtcctactgtt

SEQ ID NO: 11709 - RNA, 21 nt, synthetic construct
  misc_feature 1..21: note = HBV-targeting guide sequence portion
  source 1..21: mol_type = other RNA
tcttgttcccaagaatatggt

SEQ ID NO: 11710 - RNA, 21 nt, synthetic construct
  misc_feature 1..21: note = HBV-targeting guide sequence portion
  source 1..21: mol_type = other RNA
tcttgttggttcttctggact

SEQ ID NO: 11711 - RNA, 21 nt, synthetic construct
  misc_feature 1..21: note = HBV-targeting guide sequence portion
  source 1..21: mol_type = other RNA
tctttaaacaaacagtctttg

SEQ ID NO: 11712 - RNA, 21 nt, synthetic construct
  misc_feature 1..21: note = HBV-targeting guide sequence portion
  source 1..21: mol_type = other RNA
tctttaaccctcattggaaaa

SEQ ID NO: 11713 - RNA, 21 nt, synthetic construct
  misc_feature 1..21: note = HBV-targeting guide sequence portion
  source 1..21: mol_type = other RNA
tctttacgcggactccccgtc

SEQ ID NO: 11714 - RNA, 21 nt, synthetic construct
  misc_feature 1..21: note = HBV-targeting guide sequence portion
  source 1..21: mol_type = other RNA
tctttatatgggtcaatgtcc

SEQ ID NO: 11715 - RNA, 21 nt, synthetic construct
  misc_feature 1..21: note = HBV-targeting guide sequence portion
  source 1..21: mol_type = other RNA
tctttccaccagcaatcctct

SEQ ID NO: 11716 - RNA, 21 nt, synthetic construct
  misc_feature 1..21: note = HBV-targeting guide sequence portion
  source 1..21: mol_type = other RNA
tctttcccgaccaccagttgg

SEQ ID NO: 11717 - RNA, 21 nt, synthetic construct
  misc_feature 1..21: note = HBV-targeting guide sequence portion
  source 1..21: mol_type = other RNA
tctttccttccgtacgagatc

SEQ ID NO: 11718 - RNA, 21 nt, synthetic construct
  misc_feature 1..21: note = HBV-targeting guide sequence portion
  source 1..21: mol_type = other RNA
tctttgaagtatgcctcaagg

SEQ ID NO: 11719 - RNA, 21 nt, synthetic construct
  misc_feature 1..21: note = HBV-targeting guide sequence portion
  source 1..21: mol_type = other RNA
tctttgattttgtgtatgatg

SEQ ID NO: 11720 - RNA, 21 nt, synthetic construct
  misc_feature 1..21: note = HBV-targeting guide sequence portion
  source 1..21: mol_type = other RNA
tctttgctggggagaactaat

SEQ ID NO: 11721 - RNA, 21 nt, synthetic construct
  misc_feature 1..21: note = HBV-targeting guide sequence portion
  source 1..21: mol_type = other RNA
tctttgggtgtacatttaaac

SEQ ID NO: 11722 - RNA, 21 nt, synthetic construct
  misc_feature 1..21: note = HBV-targeting guide sequence portion
  source 1..21: mol_type = other RNA
tctttgtactaggaggctgta

SEQ ID NO: 11723 - RNA, 21 nt, synthetic construct
  misc_feature 1..21: note = HBV-targeting guide sequence portion
  source 1..21: mol_type = other RNA
tctttgttttgttagggttta

SEQ ID NO: 11724 - RNA, 21 nt, synthetic construct
  misc_feature 1..21: note = HBV-targeting guide sequence portion
  source 1..21: mol_type = other RNA
tcttttcctaatatacatcta

SEQ ID NO: 11725 - RNA, 21 nt, synthetic construct
  misc_feature 1..21: note = HBV-targeting guide sequence portion
  source 1..21: mol_type = other RNA
tcttttctcattaactgtaag

SEQ ID NO: 11726 - RNA, 21 nt, synthetic construct
  misc_feature 1..21: note = HBV-targeting guide sequence portion
  source 1..21: mol_type = other RNA
tcttttggagtgtggattcgc

SEQ ID NO: 11727 - RNA, 21 nt, synthetic construct
  misc_feature 1..21: note = HBV-targeting guide sequence portion
  source 1..21: mol_type = other RNA
tcttttgtctttgggtgtaca

SEQ ID NO: 11728 - RNA, 21 nt, synthetic construct
  misc_feature 1..21: note = HBV-targeting guide sequence portion
  source 1..21: mol_type = other RNA
tgaaaaagttgcatggtgctg

SEQ ID NO: 11729 - RNA, 21 nt, synthetic construct
  misc_feature 1..21: note = HBV-targeting guide sequence portion
  source 1..21: mol_type = other RNA
tgaaacattctttgattttgt

SEQ ID NO: 11730 - RNA, 21 nt, synthetic construct
  misc_feature 1..21: note = HBV-targeting guide sequence portion
  source 1..21: mol_type = other RNA
tgaaaccacaatagttgtctg

SEQ ID NO: 11731 - RNA, 21 nt, synthetic construct
  misc_feature 1..21: note = HBV-targeting guide sequence portion
  source 1..21: mol_type = other RNA
tgaaagccaaacagtggggga

SEQ ID NO: 11732 - RNA, 21 nt, synthetic construct
  misc_feature 1..21: note = HBV-targeting guide sequence portion
  source 1..21: mol_type = other RNA
tgaaagcctgcttagattgaa

SEQ ID NO: 11733 - RNA, 21 nt, synthetic construct
  misc_feature 1..21: note = HBV-targeting guide sequence portion
  source 1..21: mol_type = other RNA
tgaaattaagagaataacccc

SEQ ID NO: 11734 - RNA, 21 nt, synthetic construct
  misc_feature 1..21: note = HBV-targeting guide sequence portion
  source 1..21: mol_type = other RNA
tgaaattgattatgcctgcta

SEQ ID NO: 11735 - RNA, 21 nt, synthetic construct
  misc_feature 1..21: note = HBV-targeting guide sequence portion
  source 1..21: mol_type = other RNA
tgaacaaatggcactagtaaa

SEQ ID NO: 11736 - RNA, 21 nt, synthetic construct
  misc_feature 1..21: note = HBV-targeting guide sequence portion
  source 1..21: mol_type = other RNA
tgaacaagagatgattaggca

SEQ ID NO: 11737 - RNA, 21 nt, synthetic construct
  misc_feature 1..21: note = HBV-targeting guide sequence portion
  source 1..21: mol_type = other RNA
tgaacaatgctcaggagactc

SEQ ID NO: 11738 - RNA, 21 nt, synthetic construct
  misc_feature 1..21: note = HBV-targeting guide sequence portion
  source 1..21: mol_type = other RNA
tgaacagtaggacatgaacaa

SEQ ID NO: 11739 - RNA, 21 nt, synthetic construct
  misc_feature 1..21: note = HBV-targeting guide sequence portion
  source 1..21: mol_type = other RNA
tgaacagtttgtaggcccgct

SEQ ID NO: 11740 - RNA, 21 nt, synthetic construct
  misc_feature 1..21: note = HBV-targeting guide sequence portion
  source 1..21: mol_type = other RNA
tgaacatggagaacatcacat

SEQ ID NO: 11741 - RNA, 21 nt, synthetic construct
  misc_feature 1..21: note = HBV-targeting guide sequence portion
  source 1..21: mol_type = other RNA
tgaaccctagcccgaatgctc

SEQ ID NO: 11742 - RNA, 21 nt, synthetic construct
  misc_feature 1..21: note = HBV-targeting guide sequence portion
  source 1..21: mol_type = other RNA
tgaacctttaccccgttgcca

SEQ ID NO: 11743 - RNA, 21 nt, synthetic construct
  misc_feature 1..21: note = HBV-targeting guide sequence portion
  source 1..21: mol_type = other RNA
tgaacgcccaccaattcttgc

SEQ ID NO: 11744 - RNA, 21 nt, synthetic construct
  misc_feature 1..21: note = HBV-targeting guide sequence portion
  source 1..21: mol_type = other RNA
tgaactggagccaccagcagg

SEQ ID NO: 11745 - RNA, 21 nt, synthetic construct
  misc_feature 1..21: note = HBV-targeting guide sequence portion
  source 1..21: mol_type = other RNA
tgaactttaggcccatatgag

SEQ ID NO: 11746 - RNA, 21 nt, synthetic construct
  misc_feature 1..21: note = HBV-targeting guide sequence portion
  source 1..21: mol_type = other RNA
tgaagaggaagatgataaaac

SEQ ID NO: 11747 - RNA, 21 nt, synthetic construct
  misc_feature 1..21: note = HBV-targeting guide sequence portion
  source 1..21: mol_type = other RNA
tgaagcgaagtgcacacggtc

SEQ ID NO: 11748 - RNA, 21 nt, synthetic construct
  misc_feature 1..21: note = HBV-targeting guide sequence portion
  source 1..21: mol_type = other RNA
tgaaggctgggtccaactggt

SEQ ID NO: 11749 - RNA, 21 nt, synthetic construct
  misc_feature 1..21: note = HBV-targeting guide sequence portion
  source 1..21: mol_type = other RNA
tgaagtatgcctcaaggtcgg

SEQ ID NO: 11750 - RNA, 21 nt, synthetic construct
  misc_feature 1..21: note = HBV-targeting guide sequence portion
  source 1..21: mol_type = other RNA
tgaagtcccaatctggattgt

SEQ ID NO: 11751 - RNA, 21 nt, synthetic construct
  misc_feature 1..21: note = HBV-targeting guide sequence portion
  source 1..21: mol_type = other RNA
tgaatacatgcatacaagggc

SEQ ID NO: 11752 - RNA, 21 nt, synthetic construct
  misc_feature 1..21: note = HBV-targeting guide sequence portion
  source 1..21: mol_type = other RNA
tgaatcccgcggacgacccat

SEQ ID NO: 11753 - RNA, 21 nt, synthetic construct
  misc_feature 1..21: note = HBV-targeting guide sequence portion
  source 1..21: mol_type = other RNA
tgaatttaggataaaacctag

SEQ ID NO: 11754 - RNA, 21 nt, synthetic construct
  misc_feature 1..21: note = HBV-targeting guide sequence portion
  source 1..21: mol_type = other RNA
tgacaactctgttgtcctctc

SEQ ID NO: 11755 - RNA, 21 nt, synthetic construct
  misc_feature 1..21: note = HBV-targeting guide sequence portion
  source 1..21: mol_type = other RNA
tgacaagaatcctcacaatac

SEQ ID NO: 11756 - RNA, 21 nt, synthetic construct
  misc_feature 1..21: note = HBV-targeting guide sequence portion
  source 1..21: mol_type = other RNA
tgacacactttccaatcaata

SEQ ID NO: 11757 - RNA, 21 nt, synthetic construct
  misc_feature 1..21: note = HBV-targeting guide sequence portion
  source 1..21: mol_type = other RNA
tgacactctcttatataaaac

SEQ ID NO: 11758 - RNA, 21 nt, synthetic construct
  misc_feature 1..21: note = HBV-targeting guide sequence portion
  source 1..21: mol_type = other RNA
tgacataactgactactaggt

SEQ ID NO: 11759 - RNA, 21 nt, synthetic construct
  misc_feature 1..21: note = HBV-targeting guide sequence portion
  source 1..21: mol_type = other RNA
tgacatagcccatgaaattaa

SEQ ID NO: 11760 - RNA, 21 nt, synthetic construct
  misc_feature 1..21: note = HBV-targeting guide sequence portion
  source 1..21: mol_type = other RNA
tgacattgcagagagtccaag

SEQ ID NO: 11761 - RNA, 21 nt, synthetic construct
  misc_feature 1..21: note = HBV-targeting guide sequence portion
  source 1..21: mol_type = other RNA
tgaccaagccccaaccagtgg

SEQ ID NO: 11762 - RNA, 21 nt, synthetic construct
  misc_feature 1..21: note = HBV-targeting guide sequence portion
  source 1..21: mol_type = other RNA
tgacccacagaatgaggcgct

SEQ ID NO: 11763 - RNA, 21 nt, synthetic construct
  misc_feature 1..21: note = HBV-targeting guide sequence portion
  source 1..21: mol_type = other RNA
tgacccatataaagaatttgg

SEQ ID NO: 11764 - RNA, 21 nt, synthetic construct
  misc_feature 1..21: note = HBV-targeting guide sequence portion
  source 1..21: mol_type = other RNA
tgacgatatgtgagaggcagt

SEQ ID NO: 11765 - RNA, 21 nt, synthetic construct
  misc_feature 1..21: note = HBV-targeting guide sequence portion
  source 1..21: mol_type = other RNA
tgactactaggtccctagatg

SEQ ID NO: 11766 - RNA, 21 nt, synthetic construct
  misc_feature 1..21: note = HBV-targeting guide sequence portion
  source 1..21: mol_type = other RNA
tgactctagctacctgggtgg

SEQ ID NO: 11767 - RNA, 21 nt, synthetic construct
  misc_feature 1..21: note = HBV-targeting guide sequence portion
  source 1..21: mol_type = other RNA
tgactggcgattggtagaggc

SEQ ID NO: 11768 - RNA, 21 nt, synthetic construct
  misc_feature 1..21: note = HBV-targeting guide sequence portion
  source 1..21: mol_type = other RNA
tgacttctttccttccgtacg

SEQ ID NO: 11769 - RNA, 21 nt, synthetic construct
  misc_feature 1..21: note = HBV-targeting guide sequence portion
  source 1..21: mol_type = other RNA
tgagaaaagacggttgaaatt

SEQ ID NO: 11770 - RNA, 21 nt, synthetic construct
  misc_feature 1..21: note = HBV-targeting guide sequence portion
  source 1..21: mol_type = other RNA
tgagaaacactcatcctcagg

SEQ ID NO: 11771 - RNA, 21 nt, synthetic construct
  misc_feature 1..21: note = HBV-targeting guide sequence portion
  source 1..21: mol_type = other RNA
tgagaaggcacagacggggag

SEQ ID NO: 11772 - RNA, 21 nt, synthetic construct
  misc_feature 1..21: note = HBV-targeting guide sequence portion
  source 1..21: mol_type = other RNA
tgagagaagtccaccacgagt

SEQ ID NO: 11773 - RNA, 21 nt, synthetic construct
  misc_feature 1..21: note = HBV-targeting guide sequence portion
  source 1..21: mol_type = other RNA
tgagaggcagtagtcggaaca

SEQ ID NO: 11774 - RNA, 21 nt, synthetic construct
  misc_feature 1..21: note = HBV-targeting guide sequence portion
  source 1..21: mol_type = other RNA
tgagaggcctgtatctccctg

SEQ ID NO: 11775 - RNA, 21 nt, synthetic construct
  misc_feature 1..21: note = HBV-targeting guide sequence portion
  source 1..21: mol_type = other RNA
tgagatccccgagattgagat

SEQ ID NO: 11776 - RNA, 21 nt, synthetic construct
  misc_feature 1..21: note = HBV-targeting guide sequence portion
  source 1..21: mol_type = other RNA
tgagatcttcgtctgcgaggc

SEQ ID NO: 11777 - RNA, 21 nt, synthetic construct
  misc_feature 1..21: note = HBV-targeting guide sequence portion
  source 1..21: mol_type = other RNA
tgagatcttctgcgacgcggc

SEQ ID NO: 11778 - RNA, 21 nt, synthetic construct
  misc_feature 1..21: note = HBV-targeting guide sequence portion
  source 1..21: mol_type = other RNA
tgagcaggagtcgtgcaggtt

SEQ ID NO: 11779 - RNA, 21 nt, synthetic construct
  misc_feature 1..21: note = HBV-targeting guide sequence portion
  source 1..21: mol_type = other RNA
tgagcattgttcacctcacca

SEQ ID NO: 11780 - RNA, 21 nt, synthetic construct
  misc_feature 1..21: note = HBV-targeting guide sequence portion
  source 1..21: mol_type = other RNA
tgagccaagagaaacgggctg

SEQ ID NO: 11781 - RNA, 21 nt, synthetic construct
  misc_feature 1..21: note = HBV-targeting guide sequence portion
  source 1..21: mol_type = other RNA
tgagcctgagggctccacccc

SEQ ID NO: 11782 - RNA, 21 nt, synthetic construct
  misc_feature 1..21: note = HBV-targeting guide sequence portion
  source 1..21: mol_type = other RNA
tgaggatgagtgtttctcaga

SEQ ID NO: 11783 - RNA, 21 nt, synthetic construct
  misc_feature 1..21: note = HBV-targeting guide sequence portion
  source 1..21: mol_type = other RNA
tgaggattcttgtcaacaagg

SEQ ID NO: 11784 - RNA, 21 nt, synthetic construct
  misc_feature 1..21: note = HBV-targeting guide sequence portion
  source 1..21: mol_type = other RNA
tgaggcatacttcaaagactg

SEQ ID NO: 11785 - RNA, 21 nt, synthetic construct
  misc_feature 1..21: note = HBV-targeting guide sequence portion
  source 1..21: mol_type = other RNA
tgaggcatagcagcaggatga

SEQ ID NO: 11786 - RNA, 21 nt, synthetic construct
  misc_feature 1..21: note = HBV-targeting guide sequence portion
  source 1..21: mol_type = other RNA
tgaggcccactcccataggaa

SEQ ID NO: 11787 - RNA, 21 nt, synthetic construct
  misc_feature 1..21: note = HBV-targeting guide sequence portion
  source 1..21: mol_type = other RNA
tgaggcgctatgtgttgacac

SEQ ID NO: 11788 - RNA, 21 nt, synthetic construct
  misc_feature 1..21: note = HBV-targeting guide sequence portion
  source 1..21: mol_type = other RNA
tgagggctccaccccaaaagg

SEQ ID NO: 11789 - RNA, 21 nt, synthetic construct
  misc_feature 1..21: note = HBV-targeting guide sequence portion
  source 1..21: mol_type = other RNA
tgagggttaaagacaggtaca

SEQ ID NO: 11790 - RNA, 21 nt, synthetic construct
  misc_feature 1..21: note = HBV-targeting guide sequence portion
  source 1..21: mol_type = other RNA
tgaggtgaacaatgctcagga

SEQ ID NO: 11791 - RNA, 21 nt, synthetic construct
  misc_feature 1..21: note = HBV-targeting guide sequence portion
  source 1..21: mol_type = other RNA
tgagtccaagggatactaaca

SEQ ID NO: 11792 - RNA, 21 nt, synthetic construct
  misc_feature 1..21: note = HBV-targeting guide sequence portion
  source 1..21: mol_type = other RNA
tgagtccctttataccgctgt

SEQ ID NO: 11793 - RNA, 21 nt, synthetic construct
  misc_feature 1..21: note = HBV-targeting guide sequence portion
  source 1..21: mol_type = other RNA
tgagtgattggaggttgggga

SEQ ID NO: 11794 - RNA, 21 nt, synthetic construct
  misc_feature 1..21: note = HBV-targeting guide sequence portion
  source 1..21: mol_type = other RNA
tgagtgcagtatggtgaggtg

SEQ ID NO: 11795 - RNA, 21 nt, synthetic construct
  misc_feature 1..21: note = HBV-targeting guide sequence portion
  source 1..21: mol_type = other RNA
tgagtgttgacataactgact

SEQ ID NO: 11796 - RNA, 21 nt, synthetic construct
  misc_feature 1..21: note = HBV-targeting guide sequence portion
  source 1..21: mol_type = other RNA
tgagtgtttctcagaggtgga

SEQ ID NO: 11797 - RNA, 21 nt, synthetic construct
  misc_feature 1..21: note = HBV-targeting guide sequence portion
  source 1..21: mol_type = other RNA
tgataaaacgccgcagacaca

SEQ ID NO: 11798 - RNA, 21 nt, synthetic construct
  misc_feature 1..21: note = HBV-targeting guide sequence portion
  source 1..21: mol_type = other RNA
tgataatatcttggtgtagat

SEQ ID NO: 11799 - RNA, 21 nt, synthetic construct
  misc_feature 1..21: note = HBV-targeting guide sequence portion
  source 1..21: mol_type = other RNA
tgataggataggggcatttgg

SEQ ID NO: 11800 - RNA, 21 nt, synthetic construct
  misc_feature 1..21: note = HBV-targeting guide sequence portion
  source 1..21: mol_type = other RNA
tgatagtccagaagaaccaac

SEQ ID NO: 11801 - RNA, 21 nt, synthetic construct
  misc_feature 1..21: note = HBV-targeting guide sequence portion
  source 1..21: mol_type = other RNA
tgatccccaacaatcaatgac

SEQ ID NO: 11802 - RNA, 21 nt, synthetic construct
  misc_feature 1..21: note = HBV-targeting guide sequence portion
  source 1..21: mol_type = other RNA
tgatcctggaattagaggaca

SEQ ID NO: 11803 - RNA, 21 nt, synthetic construct
  misc_feature 1..21: note = HBV-targeting guide sequence portion
  source 1..21: mol_type = other RNA
tgatcttctaaattagtaccc

SEQ ID NO: 11804 - RNA, 21 nt, synthetic construct
  misc_feature 1..21: note = HBV-targeting guide sequence portion
  source 1..21: mol_type = other RNA
tgatctttgtactaggaggct

SEQ ID NO: 11805 - RNA, 21 nt, synthetic construct
  misc_feature 1..21: note = HBV-targeting guide sequence portion
  source 1..21: mol_type = other RNA
tgatgatcctggaattagagg

SEQ ID NO: 11806 - RNA, 21 nt, synthetic construct
  misc_feature 1..21: note = HBV-targeting guide sequence portion
  source 1..21: mol_type = other RNA
tgatgcaacccccactggttg

SEQ ID NO: 11807 - RNA, 21 nt, synthetic construct
  misc_feature 1..21: note = HBV-targeting guide sequence portion
  source 1..21: mol_type = other RNA
tgatggcctatgaccaagccc

SEQ ID NO: 11808 - RNA, 21 nt, synthetic construct
  misc_feature 1..21: note = HBV-targeting guide sequence portion
  source 1..21: mol_type = other RNA
tgatgggatgggaatacaggt

SEQ ID NO: 11809 - RNA, 21 nt, synthetic construct
  misc_feature 1..21: note = HBV-targeting guide sequence portion
  source 1..21: mol_type = other RNA
tgatgtgatgttctccatgtt

SEQ ID NO: 11810 - RNA, 21 nt, synthetic construct
  misc_feature 1..21: note = HBV-targeting guide sequence portion
  source 1..21: mol_type = other RNA
tgatgtgattttgtggcaatg

SEQ ID NO: 11811 - RNA, 21 nt, synthetic construct
  misc_feature 1..21: note = HBV-targeting guide sequence portion
  source 1..21: mol_type = other RNA
tgatgtggtattgggggccaa

SEQ ID NO: 11812 - RNA, 21 nt, synthetic construct
  misc_feature 1..21: note = HBV-targeting guide sequence portion
  source 1..21: mol_type = other RNA
tgatgttctccatgttcagcg

SEQ ID NO: 11813 - RNA, 21 nt, synthetic construct
  misc_feature 1..21: note = HBV-targeting guide sequence portion
  source 1..21: mol_type = other RNA
tgattaactagatgttctgga

SEQ ID NO: 11814 - RNA, 21 nt, synthetic construct
  misc_feature 1..21: note = HBV-targeting guide sequence portion
  source 1..21: mol_type = other RNA
tgattaggcagaggtgaaaaa

SEQ ID NO: 11815 - RNA, 21 nt, synthetic construct
  misc_feature 1..21: note = HBV-targeting guide sequence portion
  source 1..21: mol_type = other RNA
tgattatgcctgctaggtttt

SEQ ID NO: 11816 - RNA, 21 nt, synthetic construct
  misc_feature 1..21: note = HBV-targeting guide sequence portion
  source 1..21: mol_type = other RNA
tgattggaaagtgtgtcaacg

SEQ ID NO: 11817 - RNA, 21 nt, synthetic construct
  misc_feature 1..21: note = HBV-targeting guide sequence portion
  source 1..21: mol_type = other RNA
tgattggaggttggggactgc

SEQ ID NO: 11818 - RNA, 21 nt, synthetic construct
  misc_feature 1..21: note = HBV-targeting guide sequence portion
  source 1..21: mol_type = other RNA
tgattgttggggatcattgcc

SEQ ID NO: 11819 - RNA, 21 nt, synthetic construct
  misc_feature 1..21: note = HBV-targeting guide sequence portion
  source 1..21: mol_type = other RNA
tgattttgtggcaatgatccc

SEQ ID NO: 11820 - RNA, 21 nt, synthetic construct
  misc_feature 1..21: note = HBV-targeting guide sequence portion
  source 1..21: mol_type = other RNA
tgattttgtgtatgatgtgat

SEQ ID NO: 11821 - RNA, 21 nt, synthetic construct
  misc_feature 1..21: note = HBV-targeting guide sequence portion
  source 1..21: mol_type = other RNA
tgcaaaccttgccagcaaatc

SEQ ID NO: 11822 - RNA, 21 nt, synthetic construct
  misc_feature 1..21: note = HBV-targeting guide sequence portion
  source 1..21: mol_type = other RNA
tgcaacccccactggttgggg

SEQ ID NO: 11823 - RNA, 21 nt, synthetic construct
  misc_feature 1..21: note = HBV-targeting guide sequence portion
  source 1..21: mol_type = other RNA
tgcaactttttcacctctgcc

SEQ ID NO: 11824 - RNA, 21 nt, synthetic construct
  misc_feature 1..21: note = HBV-targeting guide sequence portion
  source 1..21: mol_type = other RNA
tgcaagatcccagagtgagag

SEQ ID NO: 11825 - RNA, 21 nt, synthetic construct
  misc_feature 1..21: note = HBV-targeting guide sequence portion
  source 1..21: mol_type = other RNA
tgcaatgtcaacgaccgacct

SEQ ID NO: 11826 - RNA, 21 nt, synthetic construct
  misc_feature 1..21: note = HBV-targeting guide sequence portion
  source 1..21: mol_type = other RNA
tgcacacggtccggcagatga

SEQ ID NO: 11827 - RNA, 21 nt, synthetic construct
  misc_feature 1..21: note = HBV-targeting guide sequence portion
  source 1..21: mol_type = other RNA
tgcacctgtattcccatccca

SEQ ID NO: 11828 - RNA, 21 nt, synthetic construct
  misc_feature 1..21: note = HBV-targeting guide sequence portion
  source 1..21: mol_type = other RNA
tgcacgactcctgctcaagga

SEQ ID NO: 11829 - RNA, 21 nt, synthetic construct
  misc_feature 1..21: note = HBV-targeting guide sequence portion
  source 1..21: mol_type = other RNA
tgcacgtcgcatggagaccac

SEQ ID NO: 11830 - RNA, 21 nt, synthetic construct
  misc_feature 1..21: note = HBV-targeting guide sequence portion
  source 1..21: mol_type = other RNA
tgcactcaggcaagcaattct

SEQ ID NO: 11831 - RNA, 21 nt, synthetic construct
  misc_feature 1..21: note = HBV-targeting guide sequence portion
  source 1..21: mol_type = other RNA
tgcacttcgcttcacctctgc

SEQ ID NO: 11832 - RNA, 21 nt, synthetic construct
  misc_feature 1..21: note = HBV-targeting guide sequence portion
  source 1..21: mol_type = other RNA
tgcagaacctgcacgactcct

SEQ ID NO: 11833 - RNA, 21 nt, synthetic construct
  misc_feature 1..21: note = HBV-targeting guide sequence portion
  source 1..21: mol_type = other RNA
tgcagagagtccaagagtcct

SEQ ID NO: 11834 - RNA, 21 nt, synthetic construct
  misc_feature 1..21: note = HBV-targeting guide sequence portion
  source 1..21: mol_type = other RNA
tgcagaggtgaagcgaagtgc

SEQ ID NO: 11835 - RNA, 21 nt, synthetic construct
  misc_feature 1..21: note = HBV-targeting guide sequence portion
  source 1..21: mol_type = other RNA
tgcagagtttggtggaaggtt

SEQ ID NO: 11836 - RNA, 21 nt, synthetic construct
  misc_feature 1..21: note = HBV-targeting guide sequence portion
  source 1..21: mol_type = other RNA
tgcagggtcccgtgctggtgg

SEQ ID NO: 11837 - RNA, 21 nt, synthetic construct
  misc_feature 1..21: note = HBV-targeting guide sequence portion
  source 1..21: mol_type = other RNA
tgcaggttctgcagggtcccg

SEQ ID NO: 11838 - RNA, 21 nt, synthetic construct
  misc_feature 1..21: note = HBV-targeting guide sequence portion
  source 1..21: mol_type = other RNA
tgcagtatggtgaggtgaaca

SEQ ID NO: 11839 - RNA, 21 nt, synthetic construct
  misc_feature 1..21: note = HBV-targeting guide sequence portion
  source 1..21: mol_type = other RNA
tgcagtttccatccgaaggtt

SEQ ID NO: 11840 - RNA, 21 nt, synthetic construct
  misc_feature 1..21: note = HBV-targeting guide sequence portion
  source 1..21: mol_type = other RNA
tgcatacaagggcattaaagc

SEQ ID NO: 11841 - RNA, 21 nt, synthetic construct
  misc_feature 1..21: note = HBV-targeting guide sequence portion
  source 1..21: mol_type = other RNA
tgcatcagcaaacacttggca

SEQ ID NO: 11842 - RNA, 21 nt, synthetic construct
  misc_feature 1..21: note = HBV-targeting guide sequence portion
  source 1..21: mol_type = other RNA
tgcatggcctgaggatgagtg

SEQ ID NO: 11843 - RNA, 21 nt, synthetic construct
  misc_feature 1..21: note = HBV-targeting guide sequence portion
  source 1..21: mol_type = other RNA
tgcatggtgctggtgcgcaga

SEQ ID NO: 11844 - RNA, 21 nt, synthetic construct
  misc_feature 1..21: note = HBV-targeting guide sequence portion
  source 1..21: mol_type = other RNA
tgcatgtattcaatctaagca

SEQ ID NO: 11845 - RNA, 21 nt, synthetic construct
  misc_feature 1..21: note = HBV-targeting guide sequence portion
  source 1..21: mol_type = other RNA
tgcattatgccctgagcctga

SEQ ID NO: 11846 - RNA, 21 nt, synthetic construct
  misc_feature 1..21: note = HBV-targeting guide sequence portion
  source 1..21: mol_type = other RNA
tgccaactggatcctgcgcgg

SEQ ID NO: 11847 - RNA, 21 nt, synthetic construct
  misc_feature 1..21: note = HBV-targeting guide sequence portion
  source 1..21: mol_type = other RNA
tgccaagtgtttgctgatgca

SEQ ID NO: 11848 - RNA, 21 nt, synthetic construct
  misc_feature 1..21: note = HBV-targeting guide sequence portion
  source 1..21: mol_type = other RNA
tgccacaaaatcacatcatac

SEQ ID NO: 11849 - RNA, 21 nt, synthetic construct
  misc_feature 1..21: note = HBV-targeting guide sequence portion
  source 1..21: mol_type = other RNA
tgccagcaaatccgcctcctg

SEQ ID NO: 11850 - RNA, 21 nt, synthetic construct
  misc_feature 1..21: note = HBV-targeting guide sequence portion
  source 1..21: mol_type = other RNA
tgccaggcaacggccaggtct

SEQ ID NO: 11851 - RNA, 21 nt, synthetic construct
  misc_feature 1..21: note = HBV-targeting guide sequence portion
  source 1..21: mol_type = other RNA
tgccatttgttcagtggttcg

SEQ ID NO: 11852 - RNA, 21 nt, synthetic construct
  misc_feature 1..21: note = HBV-targeting guide sequence portion
  source 1..21: mol_type = other RNA
tgcccaaggtcttacataaga

SEQ ID NO: 11853 - RNA, 21 nt, synthetic construct
  misc_feature 1..21: note = HBV-targeting guide sequence portion
  source 1..21: mol_type = other RNA
tgccccatgctgtagctcttg

SEQ ID NO: 11854 - RNA, 21 nt, synthetic construct
  misc_feature 1..21: note = HBV-targeting guide sequence portion
  source 1..21: mol_type = other RNA
tgcccctatcctatcaacact

SEQ ID NO: 11855 - RNA, 21 nt, synthetic construct
  misc_feature 1..21: note = HBV-targeting guide sequence portion
  source 1..21: mol_type = other RNA
tgccccttttacacaatgtgg

SEQ ID NO: 11856 - RNA, 21 nt, synthetic construct
  misc_feature 1..21: note = HBV-targeting guide sequence portion
  source 1..21: mol_type = other RNA
tgccctaaagccacccaaggc

SEQ ID NO: 11857 - RNA, 21 nt, synthetic construct
  misc_feature 1..21: note = HBV-targeting guide sequence portion
  source 1..21: mol_type = other RNA
tgccctgagcctgagggctcc

SEQ ID NO: 11858 - RNA, 21 nt, synthetic construct
  misc_feature 1..21: note = HBV-targeting guide sequence portion
  source 1..21: mol_type = other RNA
tgcccttggataagggtatta

SEQ ID NO: 11859 - RNA, 21 nt, synthetic construct
  misc_feature 1..21: note = HBV-targeting guide sequence portion
  source 1..21: mol_type = other RNA
tgcccttgtatgcatgtattc

SEQ ID NO: 11860 - RNA, 21 nt, synthetic construct
  misc_feature 1..21: note = HBV-targeting guide sequence portion
  source 1..21: mol_type = other RNA
tgccgatccatactgcggaac

SEQ ID NO: 11861 - RNA, 21 nt, synthetic construct
  misc_feature 1..21: note = HBV-targeting guide sequence portion
  source 1..21: mol_type = other RNA
tgccggaccgtgtgcacttcg

SEQ ID NO: 11862 - RNA, 21 nt, synthetic construct
  misc_feature 1..21: note = HBV-targeting guide sequence portion
  source 1..21: mol_type = other RNA
tgccgtcctgactggcgattg

SEQ ID NO: 11863 - RNA, 21 nt, synthetic construct
  misc_feature 1..21: note = HBV-targeting guide sequence portion
  source 1..21: mol_type = other RNA
tgccgttccgaccgaccacgg

SEQ ID NO: 11864 - RNA, 21 nt, synthetic construct
  misc_feature 1..21: note = HBV-targeting guide sequence portion
  source 1..21: mol_type = other RNA
tgcctaatcatctcttgttca

SEQ ID NO: 11865 - RNA, 21 nt, synthetic construct
  misc_feature 1..21: note = HBV-targeting guide sequence portion
  source 1..21: mol_type = other RNA
tgcctacagcctcctagtaca

SEQ ID NO: 11866 - RNA, 21 nt, synthetic construct
  misc_feature 1..21: note = HBV-targeting guide sequence portion
  source 1..21: mol_type = other RNA
tgcctcaaggtcggtcgttga

SEQ ID NO: 11867 - RNA, 21 nt, synthetic construct
  misc_feature 1..21: note = HBV-targeting guide sequence portion
  source 1..21: mol_type = other RNA
tgcctcatcttcttgttggtt

SEQ ID NO: 11868 - RNA, 21 nt, synthetic construct
  misc_feature 1..21: note = HBV-targeting guide sequence portion
  source 1..21: mol_type = other RNA
tgcctcgtcgtctaacaacac

SEQ ID NO: 11869 - RNA, 21 nt, synthetic construct
  misc_feature 1..21: note = HBV-targeting guide sequence portion
  source 1..21: mol_type = other RNA
tgcctctaccaatcgccagtc

SEQ ID NO: 11870 - RNA, 21 nt, synthetic construct
  misc_feature 1..21: note = HBV-targeting guide sequence portion
  source 1..21: mol_type = other RNA
tgcctctcacatatcgtcaat

SEQ ID NO: 11871 - RNA, 21 nt, synthetic construct
  misc_feature 1..21: note = HBV-targeting guide sequence portion
  source 1..21: mol_type = other RNA
tgcctgagtgcagtatggtga

SEQ ID NO: 11872 - RNA, 21 nt, synthetic construct
  misc_feature 1..21: note = HBV-targeting guide sequence portion
  source 1..21: mol_type = other RNA
tgcctgccgttccgaccgacc

SEQ ID NO: 11873 - RNA, 21 nt, synthetic construct
  misc_feature 1..21: note = HBV-targeting guide sequence portion
  source 1..21: mol_type = other RNA
tgcctgctaggttttatccta

SEQ ID NO: 11874 - RNA, 21 nt, synthetic construct
  misc_feature 1..21: note = HBV-targeting guide sequence portion
  source 1..21: mol_type = other RNA
tgcctggcaacggggtaaagg

SEQ ID NO: 11875 - RNA, 21 nt, synthetic construct
  misc_feature 1..21: note = HBV-targeting guide sequence portion
  source 1..21: mol_type = other RNA
tgccttctcatctgccggacc

SEQ ID NO: 11876 - RNA, 21 nt, synthetic construct
  misc_feature 1..21: note = HBV-targeting guide sequence portion
  source 1..21: mol_type = other RNA
tgccttctgacttctttcctt

SEQ ID NO: 11877 - RNA, 21 nt, synthetic construct
  misc_feature 1..21: note = HBV-targeting guide sequence portion
  source 1..21: mol_type = other RNA
tgccttggagtctcctgagca

SEQ ID NO: 11878 - RNA, 21 nt, synthetic construct
  misc_feature 1..21: note = HBV-targeting guide sequence portion
  source 1..21: mol_type = other RNA
tgccttgggtggctttagggc

SEQ ID NO: 11879 - RNA, 21 nt, synthetic construct
  misc_feature 1..21: note = HBV-targeting guide sequence portion
  source 1..21: mol_type = other RNA
tgcgaatccacactccaaaag

SEQ ID NO: 11880 - RNA, 21 nt, synthetic construct
  misc_feature 1..21: note = HBV-targeting guide sequence portion
  source 1..21: mol_type = other RNA
tgcgaattttggccaagacac

SEQ ID NO: 11881 - RNA, 21 nt, synthetic construct
  misc_feature 1..21: note = HBV-targeting guide sequence portion
  source 1..21: mol_type = other RNA
tgcgacgcggcgattgagatc

SEQ ID NO: 11882 - RNA, 21 nt, synthetic construct
  misc_feature 1..21: note = HBV-targeting guide sequence portion
  source 1..21: mol_type = other RNA
tgcgacgtgcagaggtgaagc

SEQ ID NO: 11883 - RNA, 21 nt, synthetic construct
  misc_feature 1..21: note = HBV-targeting guide sequence portion
  source 1..21: mol_type = other RNA
tgcgagcaaaacaagcggcta

SEQ ID NO: 11884 - RNA, 21 nt, synthetic construct
  misc_feature 1..21: note = HBV-targeting guide sequence portion
  source 1..21: mol_type = other RNA
tgcgaggcgagggagttcttc

SEQ ID NO: 11885 - RNA, 21 nt, synthetic construct
  misc_feature 1..21: note = HBV-targeting guide sequence portion
  source 1..21: mol_type = other RNA
tgcgcaccagcaccatgcaac

SEQ ID NO: 11886 - RNA, 21 nt, synthetic construct
  misc_feature 1..21: note = HBV-targeting guide sequence portion
  source 1..21: mol_type = other RNA
tgcgcagaccaatttatgcct

SEQ ID NO: 11887 - RNA, 21 nt, synthetic construct
  misc_feature 1..21: note = HBV-targeting guide sequence portion
  source 1..21: mol_type = other RNA
tgcgccccgtggtcggtcgga

SEQ ID NO: 11888 - RNA, 21 nt, synthetic construct
  misc_feature 1..21: note = HBV-targeting guide sequence portion
  source 1..21: mol_type = other RNA
tgcgcgggacgtcctttgttt

SEQ ID NO: 11889 - RNA, 21 nt, synthetic construct
  misc_feature 1..21: note = HBV-targeting guide sequence portion
  source 1..21: mol_type = other RNA
tgcgctgaacatggagaacat

SEQ ID NO: 11890 - RNA, 21 nt, synthetic construct
  misc_feature 1..21: note = HBV-targeting guide sequence portion
  source 1..21: mol_type = other RNA
tgcgctgatggcctatgacca

SEQ ID NO: 11891 - RNA, 21 nt, synthetic construct
  misc_feature 1..21: note = HBV-targeting guide sequence portion
  source 1..21: mol_type = other RNA
tgcggaactcctagccgcttg

SEQ ID NO: 11892 - RNA, 21 nt, synthetic construct
  misc_feature 1..21: note = HBV-targeting guide sequence portion
  source 1..21: mol_type = other RNA
tgcggcggtatctagaagatc

SEQ ID NO: 11893 - RNA, 21 nt, synthetic construct
  misc_feature 1..21: note = HBV-targeting guide sequence portion
  source 1..21: mol_type = other RNA
tgcggcgttttatcatcttcc

SEQ ID NO: 11894 - RNA, 21 nt, synthetic construct
  misc_feature 1..21: note = HBV-targeting guide sequence portion
  source 1..21: mol_type = other RNA
tgcgggagaggacaacagagt

SEQ ID NO: 11895 - RNA, 21 nt, synthetic construct
  misc_feature 1..21: note = HBV-targeting guide sequence portion
  source 1..21: mol_type = other RNA
tgcggtattgtgaggattctt

SEQ ID NO: 11896 - RNA, 21 nt, synthetic construct
  misc_feature 1..21: note = HBV-targeting guide sequence portion
  source 1..21: mol_type = other RNA
tgcggtggggtgaaccctagc

SEQ ID NO: 11897 - RNA, 21 nt, synthetic construct
  misc_feature 1..21: note = HBV-targeting guide sequence portion
  source 1..21: mol_type = other RNA
tgcgtggaacctttccggctc

SEQ ID NO: 11898 - RNA, 21 nt, synthetic construct
  misc_feature 1..21: note = HBV-targeting guide sequence portion
  source 1..21: mol_type = other RNA
tgctaggctgtgctgccaact

SEQ ID NO: 11899 - RNA, 21 nt, synthetic construct
  misc_feature 1..21: note = HBV-targeting guide sequence portion
  source 1..21: mol_type = other RNA
tgctaggttttatcctaaatt

SEQ ID NO: 11900 - RNA, 21 nt, synthetic construct
  misc_feature 1..21: note = HBV-targeting guide sequence portion
  source 1..21: mol_type = other RNA
tgctatgcctcatcttcttgt

SEQ ID NO: 11901 - RNA, 21 nt, synthetic construct
  misc_feature 1..21: note = HBV-targeting guide sequence portion
  source 1..21: mol_type = other RNA
tgctcaaggaacctctatgta

SEQ ID NO: 11902 - RNA, 21 nt, synthetic construct
  misc_feature 1..21: note = HBV-targeting guide sequence portion
  source 1..21: mol_type = other RNA
tgctcaggagactccaaggca

SEQ ID NO: 11903 - RNA, 21 nt, synthetic construct
  misc_feature 1..21: note = HBV-targeting guide sequence portion
  source 1..21: mol_type = other RNA
tgctccagaccggctgcgagc

SEQ ID NO: 11904 - RNA, 21 nt, synthetic construct
  misc_feature 1..21: note = HBV-targeting guide sequence portion
  source 1..21: mol_type = other RNA
tgctccagctcctaccttgtt

SEQ ID NO: 11905 - RNA, 21 nt, synthetic construct
  misc_feature 1..21: note = HBV-targeting guide sequence portion
  source 1..21: mol_type = other RNA
tgctcgcagccggtctggagc

SEQ ID NO: 11906 - RNA, 21 nt, synthetic construct
  misc_feature 1..21: note = HBV-targeting guide sequence portion
  source 1..21: mol_type = other RNA
tgctcgtgttacaggcggggt

SEQ ID NO: 11907 - RNA, 21 nt, synthetic construct
  misc_feature 1..21: note = HBV-targeting guide sequence portion
  source 1..21: mol_type = other RNA
tgctctgaaggctgggtccaa

SEQ ID NO: 11908 - RNA, 21 nt, synthetic construct
  misc_feature 1..21: note = HBV-targeting guide sequence portion
  source 1..21: mol_type = other RNA
tgctgatgcaacccccactgg

SEQ ID NO: 11909 - RNA, 21 nt, synthetic construct
  misc_feature 1..21: note = HBV-targeting guide sequence portion
  source 1..21: mol_type = other RNA
tgctgccaactggatcctgcg

SEQ ID NO: 11910 - RNA, 21 nt, synthetic construct
  misc_feature 1..21: note = HBV-targeting guide sequence portion
  source 1..21: mol_type = other RNA
tgctgccccttttacacaatg

SEQ ID NO: 11911 - RNA, 21 nt, synthetic construct
  misc_feature 1..21: note = HBV-targeting guide sequence portion
  source 1..21: mol_type = other RNA
tgctgctatgcctcatcttct

SEQ ID NO: 11912 - RNA, 21 nt, synthetic construct
  misc_feature 1..21: note = HBV-targeting guide sequence portion
  source 1..21: mol_type = other RNA
tgctggcaaggtttgcattat

SEQ ID NO: 11913 - RNA, 21 nt, synthetic construct
  misc_feature 1..21: note = HBV-targeting guide sequence portion
  source 1..21: mol_type = other RNA
tgctggggagaactaatgact

SEQ ID NO: 11914 - RNA, 21 nt, synthetic construct
  misc_feature 1..21: note = HBV-targeting guide sequence portion
  source 1..21: mol_type = other RNA
tgctggtgcgcagaccaattt

SEQ ID NO: 11915 - RNA, 21 nt, synthetic construct
  misc_feature 1..21: note = HBV-targeting guide sequence portion
  source 1..21: mol_type = other RNA
tgctggtggaaagattctgcc

SEQ ID NO: 11916 - RNA, 21 nt, synthetic construct
  misc_feature 1..21: note = HBV-targeting guide sequence portion
  source 1..21: mol_type = other RNA
tgctggtggctccagttcagg

SEQ ID NO: 11917 - RNA, 21 nt, synthetic construct
  misc_feature 1..21: note = HBV-targeting guide sequence portion
  source 1..21: mol_type = other RNA
tgctggtggttgatgatcctg

SEQ ID NO: 11918 - RNA, 21 nt, synthetic construct
  misc_feature 1..21: note = HBV-targeting guide sequence portion
  source 1..21: mol_type = other RNA
tgctgtacaaaaccttcggat

SEQ ID NO: 11919 - RNA, 21 nt, synthetic construct
  misc_feature 1..21: note = HBV-targeting guide sequence portion
  source 1..21: mol_type = other RNA
tgctgtacagacttggccccc

SEQ ID NO: 11920 - RNA, 21 nt, synthetic construct
  misc_feature 1..21: note = HBV-targeting guide sequence portion
  source 1..21: mol_type = other RNA
tgctgtagctcttgttcccaa

SEQ ID NO: 11921 - RNA, 21 nt, synthetic construct
  misc_feature 1..21: note = HBV-targeting guide sequence portion
  source 1..21: mol_type = other RNA
tgcttagattgaatacatgca

SEQ ID NO: 11922 - RNA, 21 nt, synthetic construct
  misc_feature 1..21: note = HBV-targeting guide sequence portion
  source 1..21: mol_type = other RNA
tgcttgatcttctaaattagt

SEQ ID NO: 11923 - RNA, 21 nt, synthetic construct
  misc_feature 1..21: note = HBV-targeting guide sequence portion
  source 1..21: mol_type = other RNA
tgcttgcctgagtgcagtatg

SEQ ID NO: 11924 - RNA, 21 nt, synthetic construct
  misc_feature 1..21: note = HBV-targeting guide sequence portion
  source 1..21: mol_type = other RNA
tgctttaatgcccttgtatgc

SEQ ID NO: 11925 - RNA, 21 nt, synthetic construct
  misc_feature 1..21: note = HBV-targeting guide sequence portion
  source 1..21: mol_type = other RNA
tggaaaacaccctcttttcct

SEQ ID NO: 11926 - RNA, 21 nt, synthetic construct
  misc_feature 1..21: note = HBV-targeting guide sequence portion
  source 1..21: mol_type = other RNA
tggaaactgcacctgtattcc

SEQ ID NO: 11927 - RNA, 21 nt, synthetic construct
  misc_feature 1..21: note = HBV-targeting guide sequence portion
  source 1..21: mol_type = other RNA
tggaaagattctgccccatgc

SEQ ID NO: 11928 - RNA, 21 nt, synthetic construct
  misc_feature 1..21: note = HBV-targeting guide sequence portion
  source 1..21: mol_type = other RNA
tggaaagtgtgtcaacgaatt

SEQ ID NO: 11929 - RNA, 21 nt, synthetic construct
  misc_feature 1..21: note = HBV-targeting guide sequence portion
  source 1..21: mol_type = other RNA
tggaacctttccggctcctct

SEQ ID NO: 11930 - RNA, 21 nt, synthetic construct
  misc_feature 1..21: note = HBV-targeting guide sequence portion
  source 1..21: mol_type = other RNA
tggaagagaaacggtcctaga

SEQ ID NO: 11931 - RNA, 21 nt, synthetic construct
  misc_feature 1..21: note = HBV-targeting guide sequence portion
  source 1..21: mol_type = other RNA
tggaaggcgggtgttttatat

SEQ ID NO: 11932 - RNA, 21 nt, synthetic construct
  misc_feature 1..21: note = HBV-targeting guide sequence portion
  source 1..21: mol_type = other RNA
tggaagtaatgattaactaga

SEQ ID NO: 11933 - RNA, 21 nt, synthetic construct
  misc_feature 1..21: note = HBV-targeting guide sequence portion
  source 1..21: mol_type = other RNA
tggaattagaggacagacggg

SEQ ID NO: 11934 - RNA, 21 nt, synthetic construct
  misc_feature 1..21: note = HBV-targeting guide sequence portion
  source 1..21: mol_type = other RNA
tggacattgacccatataaag

SEQ ID NO: 11935 - RNA, 21 nt, synthetic construct
  misc_feature 1..21: note = HBV-targeting guide sequence portion
  source 1..21: mol_type = other RNA
tggacccagccttcagagcaa

SEQ ID NO: 11936 - RNA, 21 nt, synthetic construct
  misc_feature 1..21: note = HBV-targeting guide sequence portion
  source 1..21: mol_type = other RNA
tggactatcaaggtatgtttc

SEQ ID NO: 11937 - RNA, 21 nt, synthetic construct
  misc_feature 1..21: note = HBV-targeting guide sequence portion
  source 1..21: mol_type = other RNA
tggactcataaggtgggaaat

SEQ ID NO: 11938 - RNA, 21 nt, synthetic construct
  misc_feature 1..21: note = HBV-targeting guide sequence portion
  source 1..21: mol_type = other RNA
tggactctctgcaatgtcaac

SEQ ID NO: 11939 - RNA, 21 nt, synthetic construct
  misc_feature 1..21: note = HBV-targeting guide sequence portion
  source 1..21: mol_type = other RNA
tggacttctctcaattttcta

SEQ ID NO: 11940 - RNA, 21 nt, synthetic construct
  misc_feature 1..21: note = HBV-targeting guide sequence portion
  source 1..21: mol_type = other RNA
tggagaacatcacatcaggat

SEQ ID NO: 11941 - RNA, 21 nt, synthetic construct
  misc_feature 1..21: note = HBV-targeting guide sequence portion
  source 1..21: mol_type = other RNA
tggagacagcggggtaggctg

SEQ ID NO: 11942 - RNA, 21 nt, synthetic construct
  misc_feature 1..21: note = HBV-targeting guide sequence portion
  source 1..21: mol_type = other RNA
tggagaccaccgtgaacgccc

SEQ ID NO: 11943 - RNA, 21 nt, synthetic construct
  misc_feature 1..21: note = HBV-targeting guide sequence portion
  source 1..21: mol_type = other RNA
tggagcaaacattctcgggac

SEQ ID NO: 11944 - RNA, 21 nt, synthetic construct
  misc_feature 1..21: note = HBV-targeting guide sequence portion
  source 1..21: mol_type = other RNA
tggagcattcgggctagggtt

SEQ ID NO: 11945 - RNA, 21 nt, synthetic construct
  misc_feature 1..21: note = HBV-targeting guide sequence portion
  source 1..21: mol_type = other RNA
tggagccaccagcagggagat

SEQ ID NO: 11946 - RNA, 21 nt, synthetic construct
  misc_feature 1..21: note = HBV-targeting guide sequence portion
  source 1..21: mol_type = other RNA
tggagccctcaggctcagggc

SEQ ID NO: 11947 - RNA, 21 nt, synthetic construct
  misc_feature 1..21: note = HBV-targeting guide sequence portion
  source 1..21: mol_type = other RNA
tggagctactgtggagttact

SEQ ID NO: 11948 - RNA, 21 nt, synthetic construct
  misc_feature 1..21: note = HBV-targeting guide sequence portion
  source 1..21: mol_type = other RNA
tggaggacaggaggttggtga

SEQ ID NO: 11949 - RNA, 21 nt, synthetic construct
  misc_feature 1..21: note = HBV-targeting guide sequence portion
  source 1..21: mol_type = other RNA
tggaggagtgcgaatccacac

SEQ ID NO: 11950 - RNA, 21 nt, synthetic construct
  misc_feature 1..21: note = HBV-targeting guide sequence portion
  source 1..21: mol_type = other RNA
tggaggcttgaacagtaggac

SEQ ID NO: 11951 - RNA, 21 nt, synthetic construct
  misc_feature 1..21: note = HBV-targeting guide sequence portion
  source 1..21: mol_type = other RNA
tggaggttggggactgcgaat

SEQ ID NO: 11952 - RNA, 21 nt, synthetic construct
  misc_feature 1..21: note = HBV-targeting guide sequence portion
  source 1..21: mol_type = other RNA
tggagtctcctgagcattgtt

SEQ ID NO: 11953 - RNA, 21 nt, synthetic construct
  misc_feature 1..21: note = HBV-targeting guide sequence portion
  source 1..21: mol_type = other RNA
tggagtgtggattcgcactcc

SEQ ID NO: 11954 - RNA, 21 nt, synthetic construct
  misc_feature 1..21: note = HBV-targeting guide sequence portion
  source 1..21: mol_type = other RNA
tggagttactctcgtttttgc

SEQ ID NO: 11955 - RNA, 21 nt, synthetic construct
  misc_feature 1..21: note = HBV-targeting guide sequence portion
  source 1..21: mol_type = other RNA
tggagtttgctctgaaggctg

SEQ ID NO: 11956 - RNA, 21 nt, synthetic construct
  misc_feature 1..21: note = HBV-targeting guide sequence portion
  source 1..21: mol_type = other RNA
tggataagggtattaaacctt

SEQ ID NO: 11957 - RNA, 21 nt, synthetic construct
  misc_feature 1..21: note = HBV-targeting guide sequence portion
  source 1..21: mol_type = other RNA
tggataataaggtttaatacc

SEQ ID NO: 11958 - RNA, 21 nt, synthetic construct
  misc_feature 1..21: note = HBV-targeting guide sequence portion
  source 1..21: mol_type = other RNA
tggatcctgcgcgggacgtcc

SEQ ID NO: 11959 - RNA, 21 nt, synthetic construct
  misc_feature 1..21: note = HBV-targeting guide sequence portion
  source 1..21: mol_type = other RNA
tggatcggcagaggagccgga

SEQ ID NO: 11960 - RNA, 21 nt, synthetic construct
  misc_feature 1..21: note = HBV-targeting guide sequence portion
  source 1..21: mol_type = other RNA
tggatgatgtggtattggggg

SEQ ID NO: 11961 - RNA, 21 nt, synthetic construct
  misc_feature 1..21: note = HBV-targeting guide sequence portion
  source 1..21: mol_type = other RNA
tggatgtgtctgcggcgtttt

SEQ ID NO: 11962 - RNA, 21 nt, synthetic construct
  misc_feature 1..21: note = HBV-targeting guide sequence portion
  source 1..21: mol_type = other RNA
tggattcgcactcctccagct

SEQ ID NO: 11963 - RNA, 21 nt, synthetic construct
  misc_feature 1..21: note = HBV-targeting guide sequence portion
  source 1..21: mol_type = other RNA
tggattgttggagtttgctct

SEQ ID NO: 11964 - RNA, 21 nt, synthetic construct
  misc_feature 1..21: note = HBV-targeting guide sequence portion
  source 1..21: mol_type = other RNA
tggcaacggggtaaaggttca

SEQ ID NO: 11965 - RNA, 21 nt, synthetic construct
  misc_feature 1..21: note = HBV-targeting guide sequence portion
  source 1..21: mol_type = other RNA
tggcaaggtttgcattatgcc

SEQ ID NO: 11966 - RNA, 21 nt, synthetic construct
  misc_feature 1..21: note = HBV-targeting guide sequence portion
  source 1..21: mol_type = other RNA
tggcaatgatccccaacaatc

SEQ ID NO: 11967 - RNA, 21 nt, synthetic construct
  misc_feature 1..21: note = HBV-targeting guide sequence portion
  source 1..21: mol_type = other RNA
tggcacagacctggccgttgc

SEQ ID NO: 11968 - RNA, 21 nt, synthetic construct
  misc_feature 1..21: note = HBV-targeting guide sequence portion
  source 1..21: mol_type = other RNA
tggcactagtaaactgagcca

SEQ ID NO: 11969 - RNA, 21 nt, synthetic construct
  misc_feature 1..21: note = HBV-targeting guide sequence portion
  source 1..21: mol_type = other RNA
tggcagcacagcctagcagcc

SEQ ID NO: 11970 - RNA, 21 nt, synthetic construct
  misc_feature 1..21: note = HBV-targeting guide sequence portion
  source 1..21: mol_type = other RNA
tggccaaaattcgcagtcccc

SEQ ID NO: 11971 - RNA, 21 nt, synthetic construct
  misc_feature 1..21: note = HBV-targeting guide sequence portion
  source 1..21: mol_type = other RNA
tggccaagacacacggtagtt

SEQ ID NO: 11972 - RNA, 21 nt, synthetic construct
  misc_feature 1..21: note = HBV-targeting guide sequence portion
  source 1..21: mol_type = other RNA
tggccagacgccaacaaggta

SEQ ID NO: 11973 - RNA, 21 nt, synthetic construct
  misc_feature 1..21: note = HBV-targeting guide sequence portion
  source 1..21: mol_type = other RNA
tggccagggatccttgttggg

SEQ ID NO: 11974 - RNA, 21 nt, synthetic construct
  misc_feature 1..21: note = HBV-targeting guide sequence portion
  source 1..21: mol_type = other RNA
tggcccccaataccacatcat

SEQ ID NO: 11975 - RNA, 21 nt, synthetic construct
  misc_feature 1..21: note = HBV-targeting guide sequence portion
  source 1..21: mol_type = other RNA
tggccgttgcctggcaacggg

SEQ ID NO: 11976 - RNA, 21 nt, synthetic construct
  misc_feature 1..21: note = HBV-targeting guide sequence portion
  source 1..21: mol_type = other RNA
tggcctatgaccaagccccaa

SEQ ID NO: 11977 - RNA, 21 nt, synthetic construct
  misc_feature 1..21: note = HBV-targeting guide sequence portion
  source 1..21: mol_type = other RNA
tggcctgaggatgagtgtttc

SEQ ID NO: 11978 - RNA, 21 nt, synthetic construct
  misc_feature 1..21: note = HBV-targeting guide sequence portion
  source 1..21: mol_type = other RNA
tggcgaaaaagtgaaagcctg

SEQ ID NO: 11979 - RNA, 21 nt, synthetic construct
  misc_feature 1..21: note = HBV-targeting guide sequence portion
  source 1..21: mol_type = other RNA
tggcgattggtagaggcagga

SEQ ID NO: 11980 - RNA, 21 nt, synthetic construct
  misc_feature 1..21: note = HBV-targeting guide sequence portion
  source 1..21: mol_type = other RNA
tggcgtctggccagggatcct

SEQ ID NO: 11981 - RNA, 21 nt, synthetic construct
  misc_feature 1..21: note = HBV-targeting guide sequence portion
  source 1..21: mol_type = other RNA
tggctcagtttactagtgcca

SEQ ID NO: 11982 - RNA, 21 nt, synthetic construct
  misc_feature 1..21: note = HBV-targeting guide sequence portion
  source 1..21: mol_type = other RNA
tggctccagttcaggaacagt

SEQ ID NO: 11983 - RNA, 21 nt, synthetic construct
  misc_feature 1..21: note = HBV-targeting guide sequence portion
  source 1..21: mol_type = other RNA
tggctgctaggctgtgctgcc

SEQ ID NO: 11984 - RNA, 21 nt, synthetic construct
  misc_feature 1..21: note = HBV-targeting guide sequence portion
  source 1..21: mol_type = other RNA
tggctttagggcatggacatt

SEQ ID NO: 11985 - RNA, 21 nt, synthetic construct
  misc_feature 1..21: note = HBV-targeting guide sequence portion
  source 1..21: mol_type = other RNA
tggctttcagttatatggatg

SEQ ID NO: 11986 - RNA, 21 nt, synthetic construct
  misc_feature 1..21: note = HBV-targeting guide sequence portion
  source 1..21: mol_type = other RNA
tgggaaattttacggggcttt

SEQ ID NO: 11987 - RNA, 21 nt, synthetic construct
  misc_feature 1..21: note = HBV-targeting guide sequence portion
  source 1..21: mol_type = other RNA
tgggaacaagagctacagcat

SEQ ID NO: 11988 - RNA, 21 nt, synthetic construct
  misc_feature 1..21: note = HBV-targeting guide sequence portion
  source 1..21: mol_type = other RNA
tgggaacgatgtatatttgcg

SEQ ID NO: 11989 - RNA, 21 nt, synthetic construct
  misc_feature 1..21: note = HBV-targeting guide sequence portion
  source 1..21: mol_type = other RNA
tgggaatacaggtgcagtttc

SEQ ID NO: 11990 - RNA, 21 nt, synthetic construct
  misc_feature 1..21: note = HBV-targeting guide sequence portion
  source 1..21: mol_type = other RNA
tgggacttcaatcccaacaag

SEQ ID NO: 11991 - RNA, 21 nt, synthetic construct
  misc_feature 1..21: note = HBV-targeting guide sequence portion
  source 1..21: mol_type = other RNA
tgggaggagttgggggaggag

SEQ ID NO: 11992 - RNA, 21 nt, synthetic construct
  misc_feature 1..21: note = HBV-targeting guide sequence portion
  source 1..21: mol_type = other RNA
tgggagtgggcctcagcccgt

SEQ ID NO: 11993 - RNA, 21 nt, synthetic construct
  misc_feature 1..21: note = HBV-targeting guide sequence portion
  source 1..21: mol_type = other RNA
tgggatcttgcagagtttggt

SEQ ID NO: 11994 - RNA, 21 nt, synthetic construct
  misc_feature 1..21: note = HBV-targeting guide sequence portion
  source 1..21: mol_type = other RNA
tgggatgggaatacaggtgca

SEQ ID NO: 11995 - RNA, 21 nt, synthetic construct
  misc_feature 1..21: note = HBV-targeting guide sequence portion
  source 1..21: mol_type = other RNA
tgggattctttcccgaccacc

SEQ ID NO: 11996 - RNA, 21 nt, synthetic construct
  misc_feature 1..21: note = HBV-targeting guide sequence portion
  source 1..21: mol_type = other RNA
tgggattgaagtcccaatctg

SEQ ID NO: 11997 - RNA, 21 nt, synthetic construct
  misc_feature 1..21: note = HBV-targeting guide sequence portion
  source 1..21: mol_type = other RNA
tgggcaagaattggtgggcgt

SEQ ID NO: 11998 - RNA, 21 nt, synthetic construct
  misc_feature 1..21: note = HBV-targeting guide sequence portion
  source 1..21: mol_type = other RNA
tgggcctaaagttcagacaac

SEQ ID NO: 11999 - RNA, 21 nt, synthetic construct
  misc_feature 1..21: note = HBV-targeting guide sequence portion
  source 1..21: mol_type = other RNA
tgggcctcagcccgtttctct

SEQ ID NO: 12000 - RNA, 21 nt, synthetic construct
  misc_feature 1..21: note = HBV-targeting guide sequence portion
  source 1..21: mol_type = other RNA
tgggcgttcacggtggtctcc

SEQ ID NO: 12001 - RNA, 21 nt, synthetic construct
  misc_feature 1..21: note = HBV-targeting guide sequence portion
  source 1..21: mol_type = other RNA
tgggctatgtcattgattgtt

SEQ ID NO: 12002 - RNA, 21 nt, synthetic construct
  misc_feature 1..21: note = HBV-targeting guide sequence portion
  source 1..21: mol_type = other RNA
tgggctttcggaaaattccta

SEQ ID NO: 12003 - RNA, 21 nt, synthetic construct
  misc_feature 1..21: note = HBV-targeting guide sequence portion
  source 1..21: mol_type = other RNA
tggggaccctgcgctgaacat

SEQ ID NO: 12004 - RNA, 21 nt, synthetic construct
  misc_feature 1..21: note = HBV-targeting guide sequence portion
  source 1..21: mol_type = other RNA
tggggactgcgaattttggcc

SEQ ID NO: 12005 - RNA, 21 nt, synthetic construct
  misc_feature 1..21: note = HBV-targeting guide sequence portion
  source 1..21: mol_type = other RNA
tggggagaactaatgactcta

SEQ ID NO: 12006 - RNA, 21 nt, synthetic construct
  misc_feature 1..21: note = HBV-targeting guide sequence portion
  source 1..21: mol_type = other RNA
tggggatcattgccacaaaat

SEQ ID NO: 12007 - RNA, 21 nt, synthetic construct
  misc_feature 1..21: note = HBV-targeting guide sequence portion
  source 1..21: mol_type = other RNA
tggggcagaatctttccacca

SEQ ID NO: 12008 - RNA, 21 nt, synthetic construct
  misc_feature 1..21: note = HBV-targeting guide sequence portion
  source 1..21: mol_type = other RNA
tggggccctgtcgtcctcttc

SEQ ID NO: 12009 - RNA, 21 nt, synthetic construct
  misc_feature 1..21: note = HBV-targeting guide sequence portion
  source 1..21: mol_type = other RNA
tggggcttggtcataggccat

SEQ ID NO: 12010 - RNA, 21 nt, synthetic construct
  misc_feature 1..21: note = HBV-targeting guide sequence portion
  source 1..21: mol_type = other RNA
tgggggaaagccctacgaacc

SEQ ID NO: 12011 - RNA, 21 nt, synthetic construct
  misc_feature 1..21: note = HBV-targeting guide sequence portion
  source 1..21: mol_type = other RNA
tgggggaggagattagattaa

SEQ ID NO: 12012 - RNA, 21 nt, synthetic construct
  misc_feature 1..21: note = HBV-targeting guide sequence portion
  source 1..21: mol_type = other RNA
tgggggccaagtctgtacagc

SEQ ID NO: 12013 - RNA, 21 nt, synthetic construct
  misc_feature 1..21: note = HBV-targeting guide sequence portion
  source 1..21: mol_type = other RNA
tgggggttgcatcagcaaaca

SEQ ID NO: 12014 - RNA, 21 nt, synthetic construct
  misc_feature 1..21: note = HBV-targeting guide sequence portion
  source 1..21: mol_type = other RNA
tggggtgaaccctagcccgaa

SEQ ID NO: 12015 - RNA, 21 nt, synthetic construct
  misc_feature 1..21: note = HBV-targeting guide sequence portion
  source 1..21: mol_type = other RNA
tggggtggagccctcaggctc

SEQ ID NO: 12016 - RNA, 21 nt, synthetic construct
  misc_feature 1..21: note = HBV-targeting guide sequence portion
  source 1..21: mol_type = other RNA
tggggttattctcttaatttc

SEQ ID NO: 12017 - RNA, 21 nt, synthetic construct
  misc_feature 1..21: note = HBV-targeting guide sequence portion
  source 1..21: mol_type = other RNA
tgggtactaatttagaagatc

SEQ ID NO: 12018 - RNA, 21 nt, synthetic construct
  misc_feature 1..21: note = HBV-targeting guide sequence portion
  source 1..21: mol_type = other RNA
tgggtcaatgtccatgcccta

SEQ ID NO: 12019 - RNA, 21 nt, synthetic construct
  misc_feature 1..21: note = HBV-targeting guide sequence portion
  source 1..21: mol_type = other RNA
tgggtcaccatattcttggga

SEQ ID NO: 12020 - RNA, 21 nt, synthetic construct
  misc_feature 1..21: note = HBV-targeting guide sequence portion
  source 1..21: mol_type = other RNA
tgggtccaactggtggtcggg

SEQ ID NO: 12021 - RNA, 21 nt, synthetic construct
  misc_feature 1..21: note = HBV-targeting guide sequence portion
  source 1..21: mol_type = other RNA
tgggtcgtccgcgggattcag

SEQ ID NO: 12022 - RNA, 21 nt, synthetic construct
  misc_feature 1..21: note = HBV-targeting guide sequence portion
  source 1..21: mol_type = other RNA
tgggtcttctgggttttgctg

SEQ ID NO: 12023 - RNA, 21 nt, synthetic construct
  misc_feature 1..21: note = HBV-targeting guide sequence portion
  source 1..21: mol_type = other RNA
tgggtggctttagggcatgga

SEQ ID NO: 12024 - RNA, 21 nt, synthetic construct
  misc_feature 1..21: note = HBV-targeting guide sequence portion
  source 1..21: mol_type = other RNA
tgggtgggtactaatttagaa

SEQ ID NO: 12025 - RNA, 21 nt, synthetic construct
  misc_feature 1..21: note = HBV-targeting guide sequence portion
  source 1..21: mol_type = other RNA
tgggtgtacatttaaacccta

SEQ ID NO: 12026 - RNA, 21 nt, synthetic construct
  misc_feature 1..21: note = HBV-targeting guide sequence portion
  source 1..21: mol_type = other RNA
tgggttttgctgcccctttta

SEQ ID NO: 12027 - RNA, 21 nt, synthetic construct
  misc_feature 1..21: note = HBV-targeting guide sequence portion
  source 1..21: mol_type = other RNA
tggtaacagcggtataaaggg

SEQ ID NO: 12028 - RNA, 21 nt, synthetic construct
  misc_feature 1..21: note = HBV-targeting guide sequence portion
  source 1..21: mol_type = other RNA
tggtagaggcaggaggcggat

SEQ ID NO: 12029 - RNA, 21 nt, synthetic construct
  misc_feature 1..21: note = HBV-targeting guide sequence portion
  source 1..21: mol_type = other RNA
tggtattgggggccaagtctg

SEQ ID NO: 12030 - RNA, 21 nt, synthetic construct
  misc_feature 1..21: note = HBV-targeting guide sequence portion
  source 1..21: mol_type = other RNA
tggtcataggccatcagcgca

SEQ ID NO: 12031 - RNA, 21 nt, synthetic construct
  misc_feature 1..21: note = HBV-targeting guide sequence portion
  source 1..21: mol_type = other RNA
tggtcgggaaagaatcccaga

SEQ ID NO: 12032 - RNA, 21 nt, synthetic construct
  misc_feature 1..21: note = HBV-targeting guide sequence portion
  source 1..21: mol_type = other RNA
tggtcggtcggaacggcaggc

SEQ ID NO: 12033 - RNA, 21 nt, synthetic construct
  misc_feature 1..21: note = HBV-targeting guide sequence portion
  source 1..21: mol_type = other RNA
tggtctataagctggaggagt

SEQ ID NO: 12034 - RNA, 21 nt, synthetic construct
  misc_feature 1..21: note = HBV-targeting guide sequence portion
  source 1..21: mol_type = other RNA
tggtctccatgcgacgtgcag

SEQ ID NO: 12035 - RNA, 21 nt, synthetic construct
  misc_feature 1..21: note = HBV-targeting guide sequence portion
  source 1..21: mol_type = other RNA
tggtctgcgcaccagcaccat

SEQ ID NO: 12036 - RNA, 21 nt, synthetic construct
  misc_feature 1..21: note = HBV-targeting guide sequence portion
  source 1..21: mol_type = other RNA
tggtgaatttaggataaaacc

SEQ ID NO: 12037 - RNA, 21 nt, synthetic construct
  misc_feature 1..21: note = HBV-targeting guide sequence portion
  source 1..21: mol_type = other RNA
tggtgacccacagaatgaggc

SEQ ID NO: 12038 - RNA, 21 nt, synthetic construct
  misc_feature 1..21: note = HBV-targeting guide sequence portion
  source 1..21: mol_type = other RNA
tggtgaggtgaacaatgctca

SEQ ID NO: 12039 - RNA, 21 nt, synthetic construct
  misc_feature 1..21: note = HBV-targeting guide sequence portion
  source 1..21: mol_type = other RNA
tggtgagtgattggaggttgg

SEQ ID NO: 12040 - RNA, 21 nt, synthetic construct
  misc_feature 1..21: note = HBV-targeting guide sequence portion
  source 1..21: mol_type = other RNA
tggtgcgcagaccaatttatg

SEQ ID NO: 12041 - RNA, 21 nt, synthetic construct
  misc_feature 1..21: note = HBV-targeting guide sequence portion
  source 1..21: mol_type = other RNA
tggtgctggtgcgcagaccaa

SEQ ID NO: 12042 - RNA, 21 nt, synthetic construct
  misc_feature 1..21: note = HBV-targeting guide sequence portion
  source 1..21: mol_type = other RNA
tggtggaaagattctgcccca

SEQ ID NO: 12043 - RNA, 21 nt, synthetic construct
  misc_feature 1..21: note = HBV-targeting guide sequence portion
  source 1..21: mol_type = other RNA
tggtggacttctctcaatttt

SEQ ID NO: 12044 - RNA, 21 nt, synthetic construct
  misc_feature 1..21: note = HBV-targeting guide sequence portion
  source 1..21: mol_type = other RNA
tggtggctccagttcaggaac

SEQ ID NO: 12045 - RNA, 21 nt, synthetic construct
  misc_feature 1..21: note = HBV-targeting guide sequence portion
  source 1..21: mol_type = other RNA
tggtgggcgttcacggtggtc

SEQ ID NO: 12046 - RNA, 21 nt, synthetic construct
  misc_feature 1..21: note = HBV-targeting guide sequence portion
  source 1..21: mol_type = other RNA
tggtggtcgggaaagaatccc

SEQ ID NO: 12047 - RNA, 21 nt, synthetic construct
  misc_feature 1..21: note = HBV-targeting guide sequence portion
  source 1..21: mol_type = other RNA
tggtggtctataagctggagg

SEQ ID NO: 12048 - RNA, 21 nt, synthetic construct
  misc_feature 1..21: note = HBV-targeting guide sequence portion
  source 1..21: mol_type = other RNA
tggtggttgatgatcctggaa

SEQ ID NO: 12049 - RNA, 21 nt, synthetic construct
  misc_feature 1..21: note = HBV-targeting guide sequence portion
  source 1..21: mol_type = other RNA
tggtgtagatgtatattagga

SEQ ID NO: 12050 - RNA, 21 nt, synthetic construct
  misc_feature 1..21: note = HBV-targeting guide sequence portion
  source 1..21: mol_type = other RNA
tggtgtcttttggagtgtgga

SEQ ID NO: 12051 - RNA, 21 nt, synthetic construct
  misc_feature 1..21: note = HBV-targeting guide sequence portion
  source 1..21: mol_type = other RNA
tggttatcctgctttaatgcc

SEQ ID NO: 12052 - RNA, 21 nt, synthetic construct
  misc_feature 1..21: note = HBV-targeting guide sequence portion
  source 1..21: mol_type = other RNA
tggttatcgctggatgtgtct

SEQ ID NO: 12053 - RNA, 21 nt, synthetic construct
  misc_feature 1..21: note = HBV-targeting guide sequence portion
  source 1..21: mol_type = other RNA
tggttcgtagggctttccccc

SEQ ID NO: 12054 - RNA, 21 nt, synthetic construct
  misc_feature 1..21: note = HBV-targeting guide sequence portion
  source 1..21: mol_type = other RNA
tggttcttctggactatcaag

SEQ ID NO: 12055 - RNA, 21 nt, synthetic construct
  misc_feature 1..21: note = HBV-targeting guide sequence portion
  source 1..21: mol_type = other RNA
tggttgatgatcctggaatta

SEQ ID NO: 12056 - RNA, 21 nt, synthetic construct
  misc_feature 1..21: note = HBV-targeting guide sequence portion
  source 1..21: mol_type = other RNA
tggttggggcttggtcatagg

SEQ ID NO: 12057 - RNA, 21 nt, synthetic construct
  misc_feature 1..21: note = HBV-targeting guide sequence portion
  source 1..21: mol_type = other RNA
tggtttcacatttcttgtctt

SEQ ID NO: 12058 - RNA, 21 nt, synthetic construct
  misc_feature 1..21: note = HBV-targeting guide sequence portion
  source 1..21: mol_type = other RNA
tgtaaaaggggcagcaaaacc

SEQ ID NO: 12059 - RNA, 21 nt, synthetic construct
  misc_feature 1..21: note = HBV-targeting guide sequence portion
  source 1..21: mol_type = other RNA
tgtaaacaatacctgaacctt

SEQ ID NO: 12060 - RNA, 21 nt, synthetic construct
  misc_feature 1..21: note = HBV-targeting guide sequence portion
  source 1..21: mol_type = other RNA
tgtaaatagtgtctagtttgg

SEQ ID NO: 12061 - RNA, 21 nt, synthetic construct
  misc_feature 1..21: note = HBV-targeting guide sequence portion
  source 1..21: mol_type = other RNA
tgtaacacgagcaggggtcct

SEQ ID NO: 12062 - RNA, 21 nt, synthetic construct
  misc_feature 1..21: note = HBV-targeting guide sequence portion
  source 1..21: mol_type = other RNA
tgtaagaccttgggcaagaat

SEQ ID NO: 12063 - RNA, 21 nt, synthetic construct
  misc_feature 1..21: note = HBV-targeting guide sequence portion
  source 1..21: mol_type = other RNA
tgtaagcgggcctacaaactg

SEQ ID NO: 12064 - RNA, 21 nt, synthetic construct
  misc_feature 1..21: note = HBV-targeting guide sequence portion
  source 1..21: mol_type = other RNA
tgtaagttggcgaaaaagtga

SEQ ID NO: 12065 - RNA, 21 nt, synthetic construct
  misc_feature 1..21: note = HBV-targeting guide sequence portion
  source 1..21: mol_type = other RNA
tgtacaaaaccttcggatgga

SEQ ID NO: 12066 - RNA, 21 nt, synthetic construct
  misc_feature 1..21: note = HBV-targeting guide sequence portion
  source 1..21: mol_type = other RNA
tgtacacccaaagacaaaaga

SEQ ID NO: 12067 - RNA, 21 nt, synthetic construct
  misc_feature 1..21: note = HBV-targeting guide sequence portion
  source 1..21: mol_type = other RNA
tgtacagacttggcccccaat

SEQ ID NO: 12068 - RNA, 21 nt, synthetic construct
  misc_feature 1..21: note = HBV-targeting guide sequence portion
  source 1..21: mol_type = other RNA
tgtacagcaacaggagggata

SEQ ID NO: 12069 - RNA, 21 nt, synthetic construct
  misc_feature 1..21: note = HBV-targeting guide sequence portion
  source 1..21: mol_type = other RNA
tgtacagcatcttgagtccct

SEQ ID NO: 12070 - RNA, 21 nt, synthetic construct
  misc_feature 1..21: note = HBV-targeting guide sequence portion
  source 1..21: mol_type = other RNA
tgtacatttaaaccctaacaa

SEQ ID NO: 12071 - RNA, 21 nt, synthetic construct
  misc_feature 1..21: note = HBV-targeting guide sequence portion
  source 1..21: mol_type = other RNA
tgtacctgtctttaaccctca

SEQ ID NO: 12072 - RNA, 21 nt, synthetic construct
  misc_feature 1..21: note = HBV-targeting guide sequence portion
  source 1..21: mol_type = other RNA
tgtactaggaggctgtaggca

SEQ ID NO: 12073 - RNA, 21 nt, synthetic construct
  misc_feature 1..21: note = HBV-targeting guide sequence portion
  source 1..21: mol_type = other RNA
tgtagatgtatattaggaaaa

SEQ ID NO: 12074 - RNA, 21 nt, synthetic construct
  misc_feature 1..21: note = HBV-targeting guide sequence portion
  source 1..21: mol_type = other RNA
tgtagctcttgttcccaagaa

SEQ ID NO: 12075 - RNA, 21 nt, synthetic construct
  misc_feature 1..21: note = HBV-targeting guide sequence portion
  source 1..21: mol_type = other RNA
tgtaggcataaattggtctgc

SEQ ID NO: 12076 - RNA, 21 nt, synthetic construct
  misc_feature 1..21: note = HBV-targeting guide sequence portion
  source 1..21: mol_type = other RNA
tgtaggcccgcttacagttaa

SEQ ID NO: 12077 - RNA, 21 nt, synthetic construct
  misc_feature 1..21: note = HBV-targeting guide sequence portion
  source 1..21: mol_type = other RNA
tgtatattaggaaaagagggt

SEQ ID NO: 12078 - RNA, 21 nt, synthetic construct
  misc_feature 1..21: note = HBV-targeting guide sequence portion
  source 1..21: mol_type = other RNA
tgtatatttgcgggagaggac

SEQ ID NO: 12079 - RNA, 21 nt, synthetic construct
  misc_feature 1..21: note = HBV-targeting guide sequence portion
  source 1..21: mol_type = other RNA
tgtatccctcctgttgctgta

SEQ ID NO: 12080 - RNA, 21 nt, synthetic construct
  misc_feature 1..21: note = HBV-targeting guide sequence portion
  source 1..21: mol_type = other RNA
tgtatcgggatgccttggagt

SEQ ID NO: 12081 - RNA, 21 nt, synthetic construct
  misc_feature 1..21: note = HBV-targeting guide sequence portion
  source 1..21: mol_type = other RNA
tgtatctccctgctggtggct

SEQ ID NO: 12082 - RNA, 21 nt, synthetic construct
  misc_feature 1..21: note = HBV-targeting guide sequence portion
  source 1..21: mol_type = other RNA
tgtatgatgtgattttgtggc

SEQ ID NO: 12083 - RNA, 21 nt, synthetic construct
  misc_feature 1..21: note = HBV-targeting guide sequence portion
  source 1..21: mol_type = other RNA
tgtatgcatgtattcaatcta

SEQ ID NO: 12084 - RNA, 21 nt, synthetic construct
  misc_feature 1..21: note = HBV-targeting guide sequence portion
  source 1..21: mol_type = other RNA
tgtattcaatctaagcaggct

SEQ ID NO: 12085 - RNA, 21 nt, synthetic construct
  misc_feature 1..21: note = HBV-targeting guide sequence portion
  source 1..21: mol_type = other RNA
tgtattcccatcccatcatcc

SEQ ID NO: 12086 - RNA, 21 nt, synthetic construct
  misc_feature 1..21: note = HBV-targeting guide sequence portion
  source 1..21: mol_type = other RNA
tgtcaacaaggaaaaccccgc

SEQ ID NO: 12087 - RNA, 21 nt, synthetic construct
  misc_feature 1..21: note = HBV-targeting guide sequence portion
  source 1..21: mol_type = other RNA
tgtcaacacatagcgcctcat

SEQ ID NO: 12088 - RNA, 21 nt, synthetic construct
  misc_feature 1..21: note = HBV-targeting guide sequence portion
  source 1..21: mol_type = other RNA
tgtcaacactcatatgggcct

SEQ ID NO: 12089 - RNA, 21 nt, synthetic construct
  misc_feature 1..21: note = HBV-targeting guide sequence portion
  source 1..21: mol_type = other RNA
tgtcaacgaattgtgggtctt

SEQ ID NO: 12090 - RNA, 21 nt, synthetic construct
  misc_feature 1..21: note = HBV-targeting guide sequence portion
  source 1..21: mol_type = other RNA
tgtcaacgaccgaccttgagg

SEQ ID NO: 12091 - RNA, 21 nt, synthetic construct
  misc_feature 1..21: note = HBV-targeting guide sequence portion
  source 1..21: mol_type = other RNA
tgtcagtcccgagaatgtttg

SEQ ID NO: 12092 - RNA, 21 nt, synthetic construct
  misc_feature 1..21: note = HBV-targeting guide sequence portion
  source 1..21: mol_type = other RNA
tgtcattgattgttggggatc

SEQ ID NO: 12093 - RNA, 21 nt, synthetic construct
  misc_feature 1..21: note = HBV-targeting guide sequence portion
  source 1..21: mol_type = other RNA
tgtccatgccctaaagccacc

SEQ ID NO: 12094 - RNA, 21 nt, synthetic construct
  misc_feature 1..21: note = HBV-targeting guide sequence portion
  source 1..21: mol_type = other RNA
tgtcctactgttcaagcctcc

SEQ ID NO: 12095 - RNA, 21 nt, synthetic construct
  misc_feature 1..21: note = HBV-targeting guide sequence portion
  source 1..21: mol_type = other RNA
tgtcctccaacttgtcctggt

SEQ ID NO: 12096 - RNA, 21 nt, synthetic construct
  misc_feature 1..21: note = HBV-targeting guide sequence portion
  source 1..21: mol_type = other RNA
tgtcctctaattccaggatca

SEQ ID NO: 12097 - RNA, 21 nt, synthetic construct
  misc_feature 1..21: note = HBV-targeting guide sequence portion
  source 1..21: mol_type = other RNA
tgtcctctcccgcaaatatac

SEQ ID NO: 12098 - RNA, 21 nt, synthetic construct
  misc_feature 1..21: note = HBV-targeting guide sequence portion
  source 1..21: mol_type = other RNA
tgtcctggttatcgctggatg

SEQ ID NO: 12099 - RNA, 21 nt, synthetic construct
  misc_feature 1..21: note = HBV-targeting guide sequence portion
  source 1..21: mol_type = other RNA
tgtcgtcctcttctctgcctg

SEQ ID NO: 12100 - RNA, 21 nt, synthetic construct
  misc_feature 1..21: note = HBV-targeting guide sequence portion
  source 1..21: mol_type = other RNA
tgtctagtttggaagtaatga

SEQ ID NO: 12101 - RNA, 21 nt, synthetic construct
  misc_feature 1..21: note = HBV-targeting guide sequence portion
  source 1..21: mol_type = other RNA
tgtctccacctctgagaaaca

SEQ ID NO: 12102 - RNA, 21 nt, synthetic construct
  misc_feature 1..21: note = HBV-targeting guide sequence portion
  source 1..21: mol_type = other RNA
tgtctgaactttaggcccata

SEQ ID NO: 12103 - RNA, 21 nt, synthetic construct
  misc_feature 1..21: note = HBV-targeting guide sequence portion
  source 1..21: mol_type = other RNA
tgtctgcggcgttttatcatc

SEQ ID NO: 12104 - RNA, 21 nt, synthetic construct
  misc_feature 1..21: note = HBV-targeting guide sequence portion
  source 1..21: mol_type = other RNA
tgtcttacttttggaagagaa

SEQ ID NO: 12105 - RNA, 21 nt, synthetic construct
  misc_feature 1..21: note = HBV-targeting guide sequence portion
  source 1..21: mol_type = other RNA
tgtcttggccaaaattcgcag

SEQ ID NO: 12106 - RNA, 21 nt, synthetic construct
  misc_feature 1..21: note = HBV-targeting guide sequence portion
  source 1..21: mol_type = other RNA
tgtctttaaccctcattggaa

SEQ ID NO: 12107 - RNA, 21 nt, synthetic construct
  misc_feature 1..21: note = HBV-targeting guide sequence portion
  source 1..21: mol_type = other RNA
tgtctttgggtgtacatttaa

SEQ ID NO: 12108 - RNA, 21 nt, synthetic construct
  misc_feature 1..21: note = HBV-targeting guide sequence portion
  source 1..21: mol_type = other RNA
tgtcttttggagtgtggattc

SEQ ID NO: 12109 - RNA, 21 nt, synthetic construct
  misc_feature 1..21: note = HBV-targeting guide sequence portion
  source 1..21: mol_type = other RNA
tgtgaaaccacaatagttgtc

SEQ ID NO: 12110 - RNA, 21 nt, synthetic construct
  misc_feature 1..21: note = HBV-targeting guide sequence portion
  source 1..21: mol_type = other RNA
tgtgaacagtttgtaggcccg

SEQ ID NO: 12111 - RNA, 21 nt, synthetic construct
  misc_feature 1..21: note = HBV-targeting guide sequence portion
  source 1..21: mol_type = other RNA
tgtgagaggcagtagtcggaa

SEQ ID NO: 12112 - RNA, 21 nt, synthetic construct
  misc_feature 1..21: note = HBV-targeting guide sequence portion
  source 1..21: mol_type = other RNA
tgtgaggattcttgtcaacaa

SEQ ID NO: 12113 - RNA, 21 nt, synthetic construct
  misc_feature 1..21: note = HBV-targeting guide sequence portion
  source 1..21: mol_type = other RNA
tgtgatgttctccatgttcag

SEQ ID NO: 12114 - RNA, 21 nt, synthetic construct
  misc_feature 1..21: note = HBV-targeting guide sequence portion
  source 1..21: mol_type = other RNA
tgtgattttgtggcaatgatc

SEQ ID NO: 12115 - RNA, 21 nt, synthetic construct
  misc_feature 1..21: note = HBV-targeting guide sequence portion
  source 1..21: mol_type = other RNA
tgtgcacttcgcttcacctct

SEQ ID NO: 12116 - RNA, 21 nt, synthetic construct
  misc_feature 1..21: note = HBV-targeting guide sequence portion
  source 1..21: mol_type = other RNA
tgtgccaagtgtttgctgatg

SEQ ID NO: 12117 - RNA, 21 nt, synthetic construct
  misc_feature 1..21: note = HBV-targeting guide sequence portion
  source 1..21: mol_type = other RNA
tgtgccttctcatctgccgga

SEQ ID NO: 12118 - RNA, 21 nt, synthetic construct
  misc_feature 1..21: note = HBV-targeting guide sequence portion
  source 1..21: mol_type = other RNA
tgtgccttgggtggctttagg

SEQ ID NO: 12119 - RNA, 21 nt, synthetic construct
  misc_feature 1..21: note = HBV-targeting guide sequence portion
  source 1..21: mol_type = other RNA
tgtgctgccaactggatcctg

SEQ ID NO: 12120 - RNA, 21 nt, synthetic construct
  misc_feature 1..21: note = HBV-targeting guide sequence portion
  source 1..21: mol_type = other RNA
tgtggagttactctcgttttt

SEQ ID NO: 12121 - RNA, 21 nt, synthetic construct
  misc_feature 1..21: note = HBV-targeting guide sequence portion
  source 1..21: mol_type = other RNA
tgtggattcgcactcctccag

SEQ ID NO: 12122 - RNA, 21 nt, synthetic construct
  misc_feature 1..21: note = HBV-targeting guide sequence portion
  source 1..21: mol_type = other RNA
tgtggcaatgatccccaacaa

SEQ ID NO: 12123 - RNA, 21 nt, synthetic construct
  misc_feature 1..21: note = HBV-targeting guide sequence portion
  source 1..21: mol_type = other RNA
tgtgggtcaccatattcttgg

SEQ ID NO: 12124 - RNA, 21 nt, synthetic construct
  misc_feature 1..21: note = HBV-targeting guide sequence portion
  source 1..21: mol_type = other RNA
tgtgggtcttctgggttttgc

SEQ ID NO: 12125 - RNA, 21 nt, synthetic construct
  misc_feature 1..21: note = HBV-targeting guide sequence portion
  source 1..21: mol_type = other RNA
tgtggtattgggggccaagtc

SEQ ID NO: 12126 - RNA, 21 nt, synthetic construct
  misc_feature 1..21: note = HBV-targeting guide sequence portion
  source 1..21: mol_type = other RNA
tgtggttatcctgctttaatg

SEQ ID NO: 12127 - RNA, 21 nt, synthetic construct
  misc_feature 1..21: note = HBV-targeting guide sequence portion
  source 1..21: mol_type = other RNA
tgtggtttcacatttcttgtc

SEQ ID NO: 12128 - RNA, 21 nt, synthetic construct
  misc_feature 1..21: note = HBV-targeting guide sequence portion
  source 1..21: mol_type = other RNA
tgtgtaaaaggggcagcaaaa

SEQ ID NO: 12129 - RNA, 21 nt, synthetic construct
  misc_feature 1..21: note = HBV-targeting guide sequence portion
  source 1..21: mol_type = other RNA
tgtgtaaacaatacctgaacc

SEQ ID NO: 12130 - RNA, 21 nt, synthetic construct
  misc_feature 1..21: note = HBV-targeting guide sequence portion
  source 1..21: mol_type = other RNA
tgtgtaaatagtgtctagttt

SEQ ID NO: 12131 - RNA, 21 nt, synthetic construct
  misc_feature 1..21: note = HBV-targeting guide sequence portion
  source 1..21: mol_type = other RNA
tgtgtatgatgtgattttgtg

SEQ ID NO: 12132 - RNA, 21 nt, synthetic construct
  misc_feature 1..21: note = HBV-targeting guide sequence portion
  source 1..21: mol_type = other RNA
tgtgtcaacgaattgtgggtc

SEQ ID NO: 12133 - RNA, 21 nt, synthetic construct
  misc_feature 1..21: note = HBV-targeting guide sequence portion
  source 1..21: mol_type = other RNA
tgtgtctgcggcgttttatca

SEQ ID NO: 12134 - RNA, 21 nt, synthetic construct
  misc_feature 1..21: note = HBV-targeting guide sequence portion
  source 1..21: mol_type = other RNA
tgtgtcttggccaaaattcgc

SEQ ID NO: 12135 - RNA, 21 nt, synthetic construct
  misc_feature 1..21: note = HBV-targeting guide sequence portion
  source 1..21: mol_type = other RNA
tgtgttgacactctcttatat

SEQ ID NO: 12136 - RNA, 21 nt, synthetic construct
  misc_feature 1..21: note = HBV-targeting guide sequence portion
  source 1..21: mol_type = other RNA
tgtgttgttagacgacgaggc

SEQ ID NO: 12137 - RNA, 21 nt, synthetic construct
  misc_feature 1..21: note = HBV-targeting guide sequence portion
  source 1..21: mol_type = other RNA
tgttaaccgggagttttctga

SEQ ID NO: 12138 - RNA, 21 nt, synthetic construct
  misc_feature 1..21: note = HBV-targeting guide sequence portion
  source 1..21: mol_type = other RNA
tgttacaggcggggttttcct

SEQ ID NO: 12139 - RNA, 21 nt, synthetic construct
  misc_feature 1..21: note = HBV-targeting guide sequence portion
  source 1..21: mol_type = other RNA
tgttaccaattttcttttgtc

SEQ ID NO: 12140 - RNA, 21 nt, synthetic construct
  misc_feature 1..21: note = HBV-targeting guide sequence portion
  source 1..21: mol_type = other RNA
tgttagacgacgaggcaggtc

SEQ ID NO: 12141 - RNA, 21 nt, synthetic construct
  misc_feature 1..21: note = HBV-targeting guide sequence portion
  source 1..21: mol_type = other RNA
tgttagggtttaaatgtacac

SEQ ID NO: 12142 - RNA, 21 nt, synthetic construct
  misc_feature 1..21: note = HBV-targeting guide sequence portion
  source 1..21: mol_type = other RNA
tgttagtatcccttggactca

SEQ ID NO: 12143 - RNA, 21 nt, synthetic construct
  misc_feature 1..21: note = HBV-targeting guide sequence portion
  source 1..21: mol_type = other RNA
tgttcaagcctccaagctgtg

SEQ ID NO: 12144 - RNA, 21 nt, synthetic construct
  misc_feature 1..21: note = HBV-targeting guide sequence portion
  source 1..21: mol_type = other RNA
tgttcacattttttgataata

SEQ ID NO: 12145 - RNA, 21 nt, synthetic construct
  misc_feature 1..21: note = HBV-targeting guide sequence portion
  source 1..21: mol_type = other RNA
tgttcacctcaccatactgca

SEQ ID NO: 12146 - RNA, 21 nt, synthetic construct
  misc_feature 1..21: note = HBV-targeting guide sequence portion
  source 1..21: mol_type = other RNA
tgttcagcgcagggtccccaa

SEQ ID NO: 12147 - RNA, 21 nt, synthetic construct
  misc_feature 1..21: note = HBV-targeting guide sequence portion
  source 1..21: mol_type = other RNA
tgttcagtggttcgtagggct

SEQ ID NO: 12148 - RNA, 21 nt, synthetic construct
  misc_feature 1..21: note = HBV-targeting guide sequence portion
  source 1..21: mol_type = other RNA
tgttcatgtcctactgttcaa

SEQ ID NO: 12149 - RNA, 21 nt, synthetic construct
  misc_feature 1..21: note = HBV-targeting guide sequence portion
  source 1..21: mol_type = other RNA
tgttcccaagaatatggtgac

SEQ ID NO: 12150 - RNA, 21 nt, synthetic construct
  misc_feature 1..21: note = HBV-targeting guide sequence portion
  source 1..21: mol_type = other RNA
tgttccgactactgcctctca

SEQ ID NO: 12151 - RNA, 21 nt, synthetic construct
  misc_feature 1..21: note = HBV-targeting guide sequence portion
  source 1..21: mol_type = other RNA
tgttcctgaactggagccacc

SEQ ID NO: 12152 - RNA, 21 nt, synthetic construct
  misc_feature 1..21: note = HBV-targeting guide sequence portion
  source 1..21: mol_type = other RNA
tgttctccatgttcagcgcag

SEQ ID NO: 12153 - RNA, 21 nt, synthetic construct
  misc_feature 1..21: note = HBV-targeting guide sequence portion
  source 1..21: mol_type = other RNA
tgttctggataataaggttta

SEQ ID NO: 12154 - RNA, 21 nt, synthetic construct
  misc_feature 1..21: note = HBV-targeting guide sequence portion
  source 1..21: mol_type = other RNA
tgttgacaagaatcctcacaa

SEQ ID NO: 12155 - RNA, 21 nt, synthetic construct
  misc_feature 1..21: note = HBV-targeting guide sequence portion
  source 1..21: mol_type = other RNA
tgttgacactctcttatataa

SEQ ID NO: 12156 - RNA, 21 nt, synthetic construct
  misc_feature 1..21: note = HBV-targeting guide sequence portion
  source 1..21: mol_type = other RNA
tgttgacataactgactacta

SEQ ID NO: 12157 - RNA, 21 nt, synthetic construct
  misc_feature 1..21: note = HBV-targeting guide sequence portion
  source 1..21: mol_type = other RNA
tgttgataggataggggcatt

SEQ ID NO: 12158 - RNA, 21 nt, synthetic construct
  misc_feature 1..21: note = HBV-targeting guide sequence portion
  source 1..21: mol_type = other RNA
tgttgctgtacaaaaccttcg

SEQ ID NO: 12159 - RNA, 21 nt, synthetic construct
  misc_feature 1..21: note = HBV-targeting guide sequence portion
  source 1..21: mol_type = other RNA
tgttggagtttgctctgaagg

SEQ ID NO: 12160 - RNA, 21 nt, synthetic construct
  misc_feature 1..21: note = HBV-targeting guide sequence portion
  source 1..21: mol_type = other RNA
tgttggcgtctggccagggat

SEQ ID NO: 12161 - RNA, 21 nt, synthetic construct
  misc_feature 1..21: note = HBV-targeting guide sequence portion
  source 1..21: mol_type = other RNA
tgttgggattgaagtcccaat

SEQ ID NO: 12162 - RNA, 21 nt, synthetic construct
  misc_feature 1..21: note = HBV-targeting guide sequence portion
  source 1..21: mol_type = other RNA
tgttggggatcattgccacaa

SEQ ID NO: 12163 - RNA, 21 nt, synthetic construct
  misc_feature 1..21: note = HBV-targeting guide sequence portion
  source 1..21: mol_type = other RNA
tgttggttcttctggactatc

SEQ ID NO: 12164 - RNA, 21 nt, synthetic construct
  misc_feature 1..21: note = HBV-targeting guide sequence portion
  source 1..21: mol_type = other RNA
tgttgtcctctcccgcaaata

SEQ ID NO: 12165 - RNA, 21 nt, synthetic construct
  misc_feature 1..21: note = HBV-targeting guide sequence portion
  source 1..21: mol_type = other RNA
tgttgttagacgacgaggcag

SEQ ID NO: 12166 - RNA, 21 nt, synthetic construct
  misc_feature 1..21: note = HBV-targeting guide sequence portion
  source 1..21: mol_type = other RNA
tgtttaaagactgggaggagt

SEQ ID NO: 12167 - RNA, 21 nt, synthetic construct
  misc_feature 1..21: note = HBV-targeting guide sequence portion
  source 1..21: mol_type = other RNA
tgtttacacagaaaggccttg

SEQ ID NO: 12168 - RNA, 21 nt, synthetic construct
  misc_feature 1..21: note = HBV-targeting guide sequence portion
  source 1..21: mol_type = other RNA
tgtttacgtcccgtcggcgct

SEQ ID NO: 12169 - RNA, 21 nt, synthetic construct
  misc_feature 1..21: note = HBV-targeting guide sequence portion
  source 1..21: mol_type = other RNA
tgtttcagaaaactcccggtt

SEQ ID NO: 12170 - RNA, 21 nt, synthetic construct
  misc_feature 1..21: note = HBV-targeting guide sequence portion
  source 1..21: mol_type = other RNA
tgtttcccgtctgtcctctaa

SEQ ID NO: 12171 - RNA, 21 nt, synthetic construct
  misc_feature 1..21: note = HBV-targeting guide sequence portion
  source 1..21: mol_type = other RNA
tgtttctcagaggtggagaca

SEQ ID NO: 12172 - RNA, 21 nt, synthetic construct
  misc_feature 1..21: note = HBV-targeting guide sequence portion
  source 1..21: mol_type = other RNA
tgtttgctccagaccggctgc

SEQ ID NO: 12173 - RNA, 21 nt, synthetic construct
  misc_feature 1..21: note = HBV-targeting guide sequence portion
  source 1..21: mol_type = other RNA
tgtttgctgatgcaaccccca

SEQ ID NO: 12174 - RNA, 21 nt, synthetic construct
  misc_feature 1..21: note = HBV-targeting guide sequence portion
  source 1..21: mol_type = other RNA
tgtttggctttcagttatatg

SEQ ID NO: 12175 - RNA, 21 nt, synthetic construct
  misc_feature 1..21: note = HBV-targeting guide sequence portion
  source 1..21: mol_type = other RNA
tgtttgtttaaagactgggag

SEQ ID NO: 12176 - RNA, 21 nt, synthetic construct
  misc_feature 1..21: note = HBV-targeting guide sequence portion
  source 1..21: mol_type = other RNA
tgttttatataagagagtgtc

SEQ ID NO: 12177 - RNA, 21 nt, synthetic construct
  misc_feature 1..21: note = HBV-targeting guide sequence portion
  source 1..21: mol_type = other RNA
tgttttccaatgagggttaaa

SEQ ID NO: 12178 - RNA, 21 nt, synthetic construct
  misc_feature 1..21: note = HBV-targeting guide sequence portion
  source 1..21: mol_type = other RNA
tgttttgctcgcagccggtct

SEQ ID NO: 12179 - RNA, 21 nt, synthetic construct
  misc_feature 1..21: note = HBV-targeting guide sequence portion
  source 1..21: mol_type = other RNA
tgttttgttagggtttaaatg

SEQ ID NO: 12180 - RNA, 21 nt, synthetic construct
  misc_feature 1..21: note = HBV-targeting guide sequence portion
  source 1..21: mol_type = other RNA
ttaaacaaacagtctttgaag

SEQ ID NO: 12181 - RNA, 21 nt, synthetic construct
  misc_feature 1..21: note = HBV-targeting guide sequence portion
  source 1..21: mol_type = other RNA
ttaaaccctaacaaaacaaag

SEQ ID NO: 12182 - RNA, 21 nt, synthetic construct
  misc_feature 1..21: note = HBV-targeting guide sequence portion
  source 1..21: mol_type = other RNA
ttaaaccttattatccagaac

SEQ ID NO: 12183 - RNA, 21 nt, synthetic construct
  misc_feature 1..21: note = HBV-targeting guide sequence portion
  source 1..21: mol_type = other RNA
ttaaagacaggtacagtagaa

SEQ ID NO: 12184 - RNA, 21 nt, synthetic construct
  misc_feature 1..21: note = HBV-targeting guide sequence portion
  source 1..21: mol_type = other RNA
ttaaagactgggaggagttgg

SEQ ID NO: 12185 - RNA, 21 nt, synthetic construct
  misc_feature 1..21: note = HBV-targeting guide sequence portion
  source 1..21: mol_type = other RNA
ttaaagcaggataaccacatt

SEQ ID NO: 12186 - RNA, 21 nt, synthetic construct
  misc_feature 1..21: note = HBV-targeting guide sequence portion
  source 1..21: mol_type = other RNA
ttaaatgtacacccaaagaca

SEQ ID NO: 12187 - RNA, 21 nt, synthetic construct
  misc_feature 1..21: note = HBV-targeting guide sequence portion
  source 1..21: mol_type = other RNA
ttaacaggcctattgattgga

SEQ ID NO: 12188 - RNA, 21 nt, synthetic construct
  misc_feature 1..21: note = HBV-targeting guide sequence portion
  source 1..21: mol_type = other RNA
ttaaccctcattggaaaacac

SEQ ID NO: 12189 - RNA, 21 nt, synthetic construct
  misc_feature 1..21: note = HBV-targeting guide sequence portion
  source 1..21: mol_type = other RNA
ttaaccgggagttttctgaaa

SEQ ID NO: 12190 - RNA, 21 nt, synthetic construct
  misc_feature 1..21: note = HBV-targeting guide sequence portion
  source 1..21: mol_type = other RNA
ttaactagatgttctggataa

SEQ ID NO: 12191 - RNA, 21 nt, synthetic construct
  misc_feature 1..21: note = HBV-targeting guide sequence portion
  source 1..21: mol_type = other RNA
ttaactgtaagcgggcctaca

SEQ ID NO: 12192 - RNA, 21 nt, synthetic construct
  misc_feature 1..21: note = HBV-targeting guide sequence portion
  source 1..21: mol_type = other RNA
ttaagagaataaccccatctc

SEQ ID NO: 12193 - RNA, 21 nt, synthetic construct
  misc_feature 1..21: note = HBV-targeting guide sequence portion
  source 1..21: mol_type = other RNA
ttaatacccttatccaagggc

SEQ ID NO: 12194 - RNA, 21 nt, synthetic construct
  misc_feature 1..21: note = HBV-targeting guide sequence portion
  source 1..21: mol_type = other RNA
ttaatcattacttccaaacta

SEQ ID NO: 12195 - RNA, 21 nt, synthetic construct
  misc_feature 1..21: note = HBV-targeting guide sequence portion
  source 1..21: mol_type = other RNA
ttaatctaatctcctccccca

SEQ ID NO: 12196 - RNA, 21 nt, synthetic construct
  misc_feature 1..21: note = HBV-targeting guide sequence portion
  source 1..21: mol_type = other RNA
ttaatgagaaaagacggttga

SEQ ID NO: 12197 - RNA, 21 nt, synthetic construct
  misc_feature 1..21: note = HBV-targeting guide sequence portion
  source 1..21: mol_type = other RNA
ttaatgatctttgtactagga

SEQ ID NO: 12198 - RNA, 21 nt, synthetic construct
  misc_feature 1..21: note = HBV-targeting guide sequence portion
  source 1..21: mol_type = other RNA
ttaatgcccttgtatgcatgt

SEQ ID NO: 12199 - RNA, 21 nt, synthetic construct
  misc_feature 1..21: note = HBV-targeting guide sequence portion
  source 1..21: mol_type = other RNA
ttaatttcatgggctatgtca

SEQ ID NO: 12200 - RNA, 21 nt, synthetic construct
  misc_feature 1..21: note = HBV-targeting guide sequence portion
  source 1..21: mol_type = other RNA
ttacaaggcctttctgtgtaa

SEQ ID NO: 12201 - RNA, 21 nt, synthetic construct
  misc_feature 1..21: note = HBV-targeting guide sequence portion
  source 1..21: mol_type = other RNA
ttacacaatgtggttatcctg

SEQ ID NO: 12202 - RNA, 21 nt, synthetic construct
  misc_feature 1..21: note = HBV-targeting guide sequence portion
  source 1..21: mol_type = other RNA
ttacacactctatggaaggcg

SEQ ID NO: 12203 - RNA, 21 nt, synthetic construct
  misc_feature 1..21: note = HBV-targeting guide sequence portion
  source 1..21: mol_type = other RNA
ttacacagaaaggccttgtaa

SEQ ID NO: 12204 - RNA, 21 nt, synthetic construct
  misc_feature 1..21: note = HBV-targeting guide sequence portion
  source 1..21: mol_type = other RNA
ttacaggcggggttttccttg

SEQ ID NO: 12205 - RNA, 21 nt, synthetic construct
  misc_feature 1..21: note = HBV-targeting guide sequence portion
  source 1..21: mol_type = other RNA
ttacagttaatgagaaaagac

SEQ ID NO: 12206 - RNA, 21 nt, synthetic construct
  misc_feature 1..21: note = HBV-targeting guide sequence portion
  source 1..21: mol_type = other RNA
ttacataagaggactcttgga

SEQ ID NO: 12207 - RNA, 21 nt, synthetic construct
  misc_feature 1..21: note = HBV-targeting guide sequence portion
  source 1..21: mol_type = other RNA
ttaccaattttcttttgtctt

SEQ ID NO: 12208 - RNA, 21 nt, synthetic construct
  misc_feature 1..21: note = HBV-targeting guide sequence portion
  source 1..21: mol_type = other RNA
ttaccccgttgccaggcaacg

SEQ ID NO: 12209 - RNA, 21 nt, synthetic construct
  misc_feature 1..21: note = HBV-targeting guide sequence portion
  source 1..21: mol_type = other RNA
ttacgcggactccccgtctgt

SEQ ID NO: 12210 - RNA, 21 nt, synthetic construct
  misc_feature 1..21: note = HBV-targeting guide sequence portion
  source 1..21: mol_type = other RNA
ttacggggctttattcttcta

SEQ ID NO: 12211 - RNA, 21 nt, synthetic construct
  misc_feature 1..21: note = HBV-targeting guide sequence portion
  source 1..21: mol_type = other RNA
ttacgtcccgtcggcgctgaa

SEQ ID NO: 12212 - RNA, 21 nt, synthetic construct
  misc_feature 1..21: note = HBV-targeting guide sequence portion
  source 1..21: mol_type = other RNA
ttactagtgccatttgttcag

SEQ ID NO: 12213 - RNA, 21 nt, synthetic construct
  misc_feature 1..21: note = HBV-targeting guide sequence portion
  source 1..21: mol_type = other RNA
ttactctcgtttttgccttct

SEQ ID NO: 12214 - RNA, 21 nt, synthetic construct
  misc_feature 1..21: note = HBV-targeting guide sequence portion
  source 1..21: mol_type = other RNA
ttactgttcctgaactggagc

SEQ ID NO: 12215 - RNA, 21 nt, synthetic construct
  misc_feature 1..21: note = HBV-targeting guide sequence portion
  source 1..21: mol_type = other RNA
ttacttccaaactagacacta

SEQ ID NO: 12216 - RNA, 21 nt, synthetic construct
  misc_feature 1..21: note = HBV-targeting guide sequence portion
  source 1..21: mol_type = other RNA
ttacttttggaagagaaacgg

SEQ ID NO: 12217 - RNA, 21 nt, synthetic construct
  misc_feature 1..21: note = HBV-targeting guide sequence portion
  source 1..21: mol_type = other RNA
ttagaagatcaagcatctagg

SEQ ID NO: 12218 - RNA, 21 nt, synthetic construct
  misc_feature 1..21: note = HBV-targeting guide sequence portion
  source 1..21: mol_type = other RNA
ttagacgacgaggcaggtccc

SEQ ID NO: 12219 - RNA, 21 nt, synthetic construct
  misc_feature 1..21: note = HBV-targeting guide sequence portion
  source 1..21: mol_type = other RNA
ttagaggacagacgggaaaca

SEQ ID NO: 12220 - RNA, 21 nt, synthetic construct
  misc_feature 1..21: note = HBV-targeting guide sequence portion
  source 1..21: mol_type = other RNA
ttagattaatgatctttgtac

SEQ ID NO: 12221 - RNA, 21 nt, synthetic construct
  misc_feature 1..21: note = HBV-targeting guide sequence portion
  source 1..21: mol_type = other RNA
ttagattgaatacatgcatac

SEQ ID NO: 12222 - RNA, 21 nt, synthetic construct
  misc_feature 1..21: note = HBV-targeting guide sequence portion
  source 1..21: mol_type = other RNA
ttaggaaaagagggtgttttc

SEQ ID NO: 12223 - RNA, 21 nt, synthetic construct
  misc_feature 1..21: note = HBV-targeting guide sequence portion
  source 1..21: mol_type = other RNA
ttaggataaaacctagcaggc

SEQ ID NO: 12224 - RNA, 21 nt, synthetic construct
  misc_feature 1..21: note = HBV-targeting guide sequence portion
  source 1..21: mol_type = other RNA
ttaggcagaggtgaaaaagtt

SEQ ID NO: 12225 - RNA, 21 nt, synthetic construct
  misc_feature 1..21: note = HBV-targeting guide sequence portion
  source 1..21: mol_type = other RNA
ttaggcccatatgagtgttga

SEQ ID NO: 12226 - RNA, 21 nt, synthetic construct
  misc_feature 1..21: note = HBV-targeting guide sequence portion
  source 1..21: mol_type = other RNA
ttagggcatggacattgaccc

SEQ ID NO: 12227 - RNA, 21 nt, synthetic construct
  misc_feature 1..21: note = HBV-targeting guide sequence portion
  source 1..21: mol_type = other RNA
ttagggtttaaatgtacaccc

SEQ ID NO: 12228 - RNA, 21 nt, synthetic construct
  misc_feature 1..21: note = HBV-targeting guide sequence portion
  source 1..21: mol_type = other RNA
ttagtacccacccaggtagct

SEQ ID NO: 12229 - RNA, 21 nt, synthetic construct
  misc_feature 1..21: note = HBV-targeting guide sequence portion
  source 1..21: mol_type = other RNA
ttagtatcccttggactcata

SEQ ID NO: 12230 - RNA, 21 nt, synthetic construct
  misc_feature 1..21: note = HBV-targeting guide sequence portion
  source 1..21: mol_type = other RNA
ttagttctccccagcaaagaa

SEQ ID NO: 12231 - RNA, 21 nt, synthetic construct
  misc_feature 1..21: note = HBV-targeting guide sequence portion
  source 1..21: mol_type = other RNA
ttataccgctgttaccaattt

SEQ ID NO: 12232 - RNA, 21 nt, synthetic construct
  misc_feature 1..21: note = HBV-targeting guide sequence portion
  source 1..21: mol_type = other RNA
ttatagaccaccaaatgcccc

SEQ ID NO: 12233 - RNA, 21 nt, synthetic construct
  misc_feature 1..21: note = HBV-targeting guide sequence portion
  source 1..21: mol_type = other RNA
ttatataaaacacccgccttc

SEQ ID NO: 12234 - RNA, 21 nt, synthetic construct
  misc_feature 1..21: note = HBV-targeting guide sequence portion
  source 1..21: mol_type = other RNA
ttatataagagagtgtcaaca

SEQ ID NO: 12235 - RNA, 21 nt, synthetic construct
  misc_feature 1..21: note = HBV-targeting guide sequence portion
  source 1..21: mol_type = other RNA
ttatatggatgatgtggtatt

SEQ ID NO: 12236 - RNA, 21 nt, synthetic construct
  misc_feature 1..21: note = HBV-targeting guide sequence portion
  source 1..21: mol_type = other RNA
ttatatgggtcaatgtccatg

SEQ ID NO: 12237 - RNA, 21 nt, synthetic construct
  misc_feature 1..21: note = HBV-targeting guide sequence portion
  source 1..21: mol_type = other RNA
ttatcaaaaaatgtgaacagt

SEQ ID NO: 12238 - RNA, 21 nt, synthetic construct
  misc_feature 1..21: note = HBV-targeting guide sequence portion
  source 1..21: mol_type = other RNA
ttatcatcttcctcttcatcc

SEQ ID NO: 12239 - RNA, 21 nt, synthetic construct
  misc_feature 1..21: note = HBV-targeting guide sequence portion
  source 1..21: mol_type = other RNA
ttatccaagggcaagtatttg

SEQ ID NO: 12240 - RNA, 21 nt, synthetic construct
  misc_feature 1..21: note = HBV-targeting guide sequence portion
  source 1..21: mol_type = other RNA
ttatccagaacatctagttaa

SEQ ID NO: 12241 - RNA, 21 nt, synthetic construct
  misc_feature 1..21: note = HBV-targeting guide sequence portion
  source 1..21: mol_type = other RNA
ttatcctaaattcaccaaata

SEQ ID NO: 12242 - RNA, 21 nt, synthetic construct
  misc_feature 1..21: note = HBV-targeting guide sequence portion
  source 1..21: mol_type = other RNA
ttatcctgctttaatgccctt

SEQ ID NO: 12243 - RNA, 21 nt, synthetic construct
  misc_feature 1..21: note = HBV-targeting guide sequence portion
  source 1..21: mol_type = other RNA
ttatcgctggatgtgtctgcg

SEQ ID NO: 12244 - RNA, 21 nt, synthetic construct
  misc_feature 1..21: note = HBV-targeting guide sequence portion
  source 1..21: mol_type = other RNA
ttatgagtccaagggatacta

SEQ ID NO: 12245 - RNA, 21 nt, synthetic construct
  misc_feature 1..21: note = HBV-targeting guide sequence portion
  source 1..21: mol_type = other RNA
ttatgccctgagcctgagggc

SEQ ID NO: 12246 - RNA, 21 nt, synthetic construct
  misc_feature 1..21: note = HBV-targeting guide sequence portion
  source 1..21: mol_type = other RNA
ttatgcctacagcctcctagt

SEQ ID NO: 12247 - RNA, 21 nt, synthetic construct
  misc_feature 1..21: note = HBV-targeting guide sequence portion
  source 1..21: mol_type = other RNA
ttatgcctgctaggttttatc

SEQ ID NO: 12248 - RNA, 21 nt, synthetic construct
  misc_feature 1..21: note = HBV-targeting guide sequence portion
  source 1..21: mol_type = other RNA
ttatgtaagaccttgggcaag

SEQ ID NO: 12249 - RNA, 21 nt, synthetic construct
  misc_feature 1..21: note = HBV-targeting guide sequence portion
  source 1..21: mol_type = other RNA
ttatgtcaacactcatatggg

SEQ ID NO: 12250 - RNA, 21 nt, synthetic construct
  misc_feature 1..21: note = HBV-targeting guide sequence portion
  source 1..21: mol_type = other RNA
ttattatccagaacatctagt

SEQ ID NO: 12251 - RNA, 21 nt, synthetic construct
  misc_feature 1..21: note = HBV-targeting guide sequence portion
  source 1..21: mol_type = other RNA
ttattctcttaatttcatggg

SEQ ID NO: 12252 - RNA, 21 nt, synthetic construct
  misc_feature 1..21: note = HBV-targeting guide sequence portion
  source 1..21: mol_type = other RNA
ttattcttctactgtacctgt

SEQ ID NO: 12253 - RNA, 21 nt, synthetic construct
  misc_feature 1..21: note = HBV-targeting guide sequence portion
  source 1..21: mol_type = other RNA
ttcaaagactgtttgtttaaa

SEQ ID NO: 12254 - RNA, 21 nt, synthetic construct
  misc_feature 1..21: note = HBV-targeting guide sequence portion
  source 1..21: mol_type = other RNA
ttcaaccgtcttttctcatta

SEQ ID NO: 12255 - RNA, 21 nt, synthetic construct
  misc_feature 1..21: note = HBV-targeting guide sequence portion
  source 1..21: mol_type = other RNA
ttcaagcctccaagctgtgcc

SEQ ID NO: 12256 - RNA, 21 nt, synthetic construct
  misc_feature 1..21: note = HBV-targeting guide sequence portion
  source 1..21: mol_type = other RNA
ttcaatcccaacaaggatccc

SEQ ID NO: 12257 - RNA, 21 nt, synthetic construct
  misc_feature 1..21: note = HBV-targeting guide sequence portion
  source 1..21: mol_type = other RNA
ttcaatctaagcaggctttca

SEQ ID NO: 12258 - RNA, 21 nt, synthetic construct
  misc_feature 1..21: note = HBV-targeting guide sequence portion
  source 1..21: mol_type = other RNA
ttcacatttcttgtcttactt

SEQ ID NO: 12259 - RNA, 21 nt, synthetic construct
  misc_feature 1..21: note = HBV-targeting guide sequence portion
  source 1..21: mol_type = other RNA
ttcacattttttgataatatc

SEQ ID NO: 12260 - RNA, 21 nt, synthetic construct
  misc_feature 1..21: note = HBV-targeting guide sequence portion
  source 1..21: mol_type = other RNA
ttcaccaaatacttgcccttg

SEQ ID NO: 12261 - RNA, 21 nt, synthetic construct
  misc_feature 1..21: note = HBV-targeting guide sequence portion
  source 1..21: mol_type = other RNA
ttcaccccaccgcacggaggc

SEQ ID NO: 12262 - RNA, 21 nt, synthetic construct
  misc_feature 1..21: note = HBV-targeting guide sequence portion
  source 1..21: mol_type = other RNA
ttcacctcaccatactgcact

SEQ ID NO: 12263 - RNA, 21 nt, synthetic construct
  misc_feature 1..21: note = HBV-targeting guide sequence portion
  source 1..21: mol_type = other RNA
ttcacctctgcacgtcgcatg

SEQ ID NO: 12264 - RNA, 21 nt, synthetic construct
  misc_feature 1..21: note = HBV-targeting guide sequence portion
  source 1..21: mol_type = other RNA
ttcacctctgcctaatcatct

SEQ ID NO: 12265 - RNA, 21 nt, synthetic construct
  misc_feature 1..21: note = HBV-targeting guide sequence portion
  source 1..21: mol_type = other RNA
ttcacggtggtctccatgcga

SEQ ID NO: 12266 - RNA, 21 nt, synthetic construct
  misc_feature 1..21: note = HBV-targeting guide sequence portion
  source 1..21: mol_type = other RNA
ttcactttttcgccaacttac

SEQ ID NO: 12267 - RNA, 21 nt, synthetic construct
  misc_feature 1..21: note = HBV-targeting guide sequence portion
  source 1..21: mol_type = other RNA
ttcagaaaactcccggttaac

SEQ ID NO: 12268 - RNA, 21 nt, synthetic construct
  misc_feature 1..21: note = HBV-targeting guide sequence portion
  source 1..21: mol_type = other RNA
ttcagacaactattgtggttt

SEQ ID NO: 12269 - RNA, 21 nt, synthetic construct
  misc_feature 1..21: note = HBV-targeting guide sequence portion
  source 1..21: mol_type = other RNA
ttcagagcaaactccaacaat

SEQ ID NO: 12270 - RNA, 21 nt, synthetic construct
  misc_feature 1..21: note = HBV-targeting guide sequence portion
  source 1..21: mol_type = other RNA
ttcagcgcagggtccccaatc

SEQ ID NO: 12271 - RNA, 21 nt, synthetic construct
  misc_feature 1..21: note = HBV-targeting guide sequence portion
  source 1..21: mol_type = other RNA
ttcagcgccgacgggacgtaa

SEQ ID NO: 12272 - RNA, 21 nt, synthetic construct
  misc_feature 1..21: note = HBV-targeting guide sequence portion
  source 1..21: mol_type = other RNA
ttcaggaacagtaaaccctgt

SEQ ID NO: 12273 - RNA, 21 nt, synthetic construct
  misc_feature 1..21: note = HBV-targeting guide sequence portion
  source 1..21: mol_type = other RNA
ttcaggtattgtttacacaga

SEQ ID NO: 12274 - RNA, 21 nt, synthetic construct
  misc_feature 1..21: note = HBV-targeting guide sequence portion
  source 1..21: mol_type = other RNA
ttcagtggttcgtagggcttt

SEQ ID NO: 12275 - RNA, 21 nt, synthetic construct
  misc_feature 1..21: note = HBV-targeting guide sequence portion
  source 1..21: mol_type = other RNA
ttcagttatatggatgatgtg

SEQ ID NO: 12276 - RNA, 21 nt, synthetic construct
  misc_feature 1..21: note = HBV-targeting guide sequence portion
  source 1..21: mol_type = other RNA
ttcatcctgctgctatgcctc

SEQ ID NO: 12277 - RNA, 21 nt, synthetic construct
  misc_feature 1..21: note = HBV-targeting guide sequence portion
  source 1..21: mol_type = other RNA
ttcatgggctatgtcattgat

SEQ ID NO: 12278 - RNA, 21 nt, synthetic construct
  misc_feature 1..21: note = HBV-targeting guide sequence portion
  source 1..21: mol_type = other RNA
ttcatgtcctactgttcaagc

SEQ ID NO: 12279 - RNA, 21 nt, synthetic construct
  misc_feature 1..21: note = HBV-targeting guide sequence portion
  source 1..21: mol_type = other RNA
ttccaaaagtaagacaagaaa

SEQ ID NO: 12280 - RNA, 21 nt, synthetic construct
  misc_feature 1..21: note = HBV-targeting guide sequence portion
  source 1..21: mol_type = other RNA
ttccaaactagacactattta

SEQ ID NO: 12281 - RNA, 21 nt, synthetic construct
  misc_feature 1..21: note = HBV-targeting guide sequence portion
  source 1..21: mol_type = other RNA
ttccaatcaataggcctgtta

SEQ ID NO: 12282 - RNA, 21 nt, synthetic construct
  misc_feature 1..21: note = HBV-targeting guide sequence portion
  source 1..21: mol_type = other RNA
ttccaatgagggttaaagaca

SEQ ID NO: 12283 - RNA, 21 nt, synthetic construct
  misc_feature 1..21: note = HBV-targeting guide sequence portion
  source 1..21: mol_type = other RNA
ttccaccaaactctgcaagat

SEQ ID NO: 12284 - RNA, 21 nt, synthetic construct
  misc_feature 1..21: note = HBV-targeting guide sequence portion
  source 1..21: mol_type = other RNA
ttccaccagcaatcctctggg

SEQ ID NO: 12285 - RNA, 21 nt, synthetic construct
  misc_feature 1..21: note = HBV-targeting guide sequence portion
  source 1..21: mol_type = other RNA
ttccacgcatgcgctgatggc

SEQ ID NO: 12286 - RNA, 21 nt, synthetic construct
  misc_feature 1..21: note = HBV-targeting guide sequence portion
  source 1..21: mol_type = other RNA
ttccaggatcatcaaccacca

SEQ ID NO: 12287 - RNA, 21 nt, synthetic construct
  misc_feature 1..21: note = HBV-targeting guide sequence portion
  source 1..21: mol_type = other RNA
ttccatagagtgtgtaaatag

SEQ ID NO: 12288 - RNA, 21 nt, synthetic construct
  misc_feature 1..21: note = HBV-targeting guide sequence portion
  source 1..21: mol_type = other RNA
ttccatccgaaggttttgtac

SEQ ID NO: 12289 - RNA, 21 nt, synthetic construct
  misc_feature 1..21: note = HBV-targeting guide sequence portion
  source 1..21: mol_type = other RNA
ttcccaagaatatggtgaccc

SEQ ID NO: 12290 - RNA, 21 nt, synthetic construct
  misc_feature 1..21: note = HBV-targeting guide sequence portion
  source 1..21: mol_type = other RNA
ttcccaccttatgagtccaag

SEQ ID NO: 12291 - RNA, 21 nt, synthetic construct
  misc_feature 1..21: note = HBV-targeting guide sequence portion
  source 1..21: mol_type = other RNA
ttcccatcccatcatcctggg

SEQ ID NO: 12292 - RNA, 21 nt, synthetic construct
  misc_feature 1..21: note = HBV-targeting guide sequence portion
  source 1..21: mol_type = other RNA
ttcccatggctgctaggctgt

SEQ ID NO: 12293 - RNA, 21 nt, synthetic construct
  misc_feature 1..21: note = HBV-targeting guide sequence portion
  source 1..21: mol_type = other RNA
ttcccccactgtttggctttc

SEQ ID NO: 12294 - RNA, 21 nt, synthetic construct
  misc_feature 1..21: note = HBV-targeting guide sequence portion
  source 1..21: mol_type = other RNA
ttccccctagaaaattgagag

SEQ ID NO: 12295 - RNA, 21 nt, synthetic construct
  misc_feature 1..21: note = HBV-targeting guide sequence portion
  source 1..21: mol_type = other RNA
ttcccgaccaccagttggacc

SEQ ID NO: 12296 - RNA, 21 nt, synthetic construct
  misc_feature 1..21: note = HBV-targeting guide sequence portion
  source 1..21: mol_type = other RNA
ttcccgtctgtcctctaattc

SEQ ID NO: 12297 - RNA, 21 nt, synthetic construct
  misc_feature 1..21: note = HBV-targeting guide sequence portion
  source 1..21: mol_type = other RNA
ttccgaaagcccaggatgatg

SEQ ID NO: 12298 - RNA, 21 nt, synthetic construct
  misc_feature 1..21: note = HBV-targeting guide sequence portion
  source 1..21: mol_type = other RNA
ttccgaccgaccacggggcgc

SEQ ID NO: 12299 - RNA, 21 nt, synthetic construct
  misc_feature 1..21: note = HBV-targeting guide sequence portion
  source 1..21: mol_type = other RNA
ttccgactactgcctctcaca

SEQ ID NO: 12300 - RNA, 21 nt, synthetic construct
  misc_feature 1..21: note = HBV-targeting guide sequence portion
  source 1..21: mol_type = other RNA
ttccgcagtatggatcggcag

SEQ ID NO: 12301 - RNA, 21 nt, synthetic construct
  misc_feature 1..21: note = HBV-targeting guide sequence portion
  source 1..21: mol_type = other RNA
ttccggagacttgtgttgtta

SEQ ID NO: 12302 - RNA, 21 nt, synthetic construct
  misc_feature 1..21: note = HBV-targeting guide sequence portion
  source 1..21: mol_type = other RNA
ttccggctcctctgccgatcc

SEQ ID NO: 12303 - RNA, 21 nt, synthetic construct
  misc_feature 1..21: note = HBV-targeting guide sequence portion
  source 1..21: mol_type = other RNA
ttccgtacgagatcttctaga

SEQ ID NO: 12304 - RNA, 21 nt, synthetic construct
  misc_feature 1..21: note = HBV-targeting guide sequence portion
  source 1..21: mol_type = other RNA
ttcctaatatacatctacacc

SEQ ID NO: 12305 - RNA, 21 nt, synthetic construct
  misc_feature 1..21: note = HBV-targeting guide sequence portion
  source 1..21: mol_type = other RNA
ttcctaggacccctgctcgtg

SEQ ID NO: 12306 - RNA, 21 nt, synthetic construct
  misc_feature 1..21: note = HBV-targeting guide sequence portion
  source 1..21: mol_type = other RNA
ttcctatgggagtgggcctca

SEQ ID NO: 12307 - RNA, 21 nt, synthetic construct
  misc_feature 1..21: note = HBV-targeting guide sequence portion
  source 1..21: mol_type = other RNA
ttcctcttcatcctgctgcta

SEQ ID NO: 12308 - RNA, 21 nt, synthetic construct
  misc_feature 1..21: note = HBV-targeting guide sequence portion
  source 1..21: mol_type = other RNA
ttcctgaactggagccaccag

SEQ ID NO: 12309 - RNA, 21 nt, synthetic construct
  misc_feature 1..21: note = HBV-targeting guide sequence portion
  source 1..21: mol_type = other RNA
ttccttccgtacgagatcttc

SEQ ID NO: 12310 - RNA, 21 nt, synthetic construct
  misc_feature 1..21: note = HBV-targeting guide sequence portion
  source 1..21: mol_type = other RNA
ttccttgagcaggagtcgtgc

SEQ ID NO: 12311 - RNA, 21 nt, synthetic construct
  misc_feature 1..21: note = HBV-targeting guide sequence portion
  source 1..21: mol_type = other RNA
ttccttgttgacaagaatcct

SEQ ID NO: 12312 - RNA, 21 nt, synthetic construct
  misc_feature 1..21: note = HBV-targeting guide sequence portion
  source 1..21: mol_type = other RNA
ttcgcactcctccagcttata

SEQ ID NO: 12313 - RNA, 21 nt, synthetic construct
  misc_feature 1..21: note = HBV-targeting guide sequence portion
  source 1..21: mol_type = other RNA
ttcgcagtccccaacctccaa

SEQ ID NO: 12314 - RNA, 21 nt, synthetic construct
  misc_feature 1..21: note = HBV-targeting guide sequence portion
  source 1..21: mol_type = other RNA
ttcgccaacttacaaggcctt

SEQ ID NO: 12315 - RNA, 21 nt, synthetic construct
  misc_feature 1..21: note = HBV-targeting guide sequence portion
  source 1..21: mol_type = other RNA
ttcgcttcacctctgcacgtc

SEQ ID NO: 12316 - RNA, 21 nt, synthetic construct
  misc_feature 1..21: note = HBV-targeting guide sequence portion
  source 1..21: mol_type = other RNA
ttcggaaaattcctatgggag

SEQ ID NO: 12317 - RNA, 21 nt, synthetic construct
  misc_feature 1..21: note = HBV-targeting guide sequence portion
  source 1..21: mol_type = other RNA
ttcggatggaaactgcacctg

SEQ ID NO: 12318 - RNA, 21 nt, synthetic construct
  misc_feature 1..21: note = HBV-targeting guide sequence portion
  source 1..21: mol_type = other RNA
ttcgggctagggttcacccca

SEQ ID NO: 12319 - RNA, 21 nt, synthetic construct
  misc_feature 1..21: note = HBV-targeting guide sequence portion
  source 1..21: mol_type = other RNA
ttcgtagggctttcccccact

SEQ ID NO: 12320 - RNA, 21 nt, synthetic construct
  misc_feature 1..21: note = HBV-targeting guide sequence portion
  source 1..21: mol_type = other RNA
ttcgtctgcgaggcgagggag

SEQ ID NO: 12321 - RNA, 21 nt, synthetic construct
  misc_feature 1..21: note = HBV-targeting guide sequence portion
  source 1..21: mol_type = other RNA
ttcgttgacacactttccaat

SEQ ID NO: 12322 - RNA, 21 nt, synthetic construct
  misc_feature 1..21: note = HBV-targeting guide sequence portion
  source 1..21: mol_type = other RNA
ttctaaattagtacccaccca

SEQ ID NO: 12323 - RNA, 21 nt, synthetic construct
  misc_feature 1..21: note = HBV-targeting guide sequence portion
  source 1..21: mol_type = other RNA
ttctactgtacctgtctttaa

SEQ ID NO: 12324 - RNA, 21 nt, synthetic construct
  misc_feature 1..21: note = HBV-targeting guide sequence portion
  source 1..21: mol_type = other RNA
ttctagataccgccgcagctc

SEQ ID NO: 12325 - RNA, 21 nt, synthetic construct
  misc_feature 1..21: note = HBV-targeting guide sequence portion
  source 1..21: mol_type = other RNA
ttctaggggacctgcctcgtc

SEQ ID NO: 12326 - RNA, 21 nt, synthetic construct
  misc_feature 1..21: note = HBV-targeting guide sequence portion
  source 1..21: mol_type = other RNA
ttctagggggaactaccgtgt

SEQ ID NO: 12327 - RNA, 21 nt, synthetic construct
  misc_feature 1..21: note = HBV-targeting guide sequence portion
  source 1..21: mol_type = other RNA
ttctcagaggtggagacagcg

SEQ ID NO: 12328 - RNA, 21 nt, synthetic construct
  misc_feature 1..21: note = HBV-targeting guide sequence portion
  source 1..21: mol_type = other RNA
ttctcatctgccggaccgtgt

SEQ ID NO: 12329 - RNA, 21 nt, synthetic construct
  misc_feature 1..21: note = HBV-targeting guide sequence portion
  source 1..21: mol_type = other RNA
ttctcattaactgtaagcggg

SEQ ID NO: 12330 - RNA, 21 nt, synthetic construct
  misc_feature 1..21: note = HBV-targeting guide sequence portion
  source 1..21: mol_type = other RNA
ttctccatgttcagcgcaggg

SEQ ID NO: 12331 - RNA, 21 nt, synthetic construct
  misc_feature 1..21: note = HBV-targeting guide sequence portion
  source 1..21: mol_type = other RNA
ttctccccagcaaagaattgc

SEQ ID NO: 12332 - RNA, 21 nt, synthetic construct
  misc_feature 1..21: note = HBV-targeting guide sequence portion
  source 1..21: mol_type = other RNA
ttctcgaggattggggaccct

SEQ ID NO: 12333 - RNA, 21 nt, synthetic construct
  misc_feature 1..21: note = HBV-targeting guide sequence portion
  source 1..21: mol_type = other RNA
ttctcgggactgacaactctg

SEQ ID NO: 12334 - RNA, 21 nt, synthetic construct
  misc_feature 1..21: note = HBV-targeting guide sequence portion
  source 1..21: mol_type = other RNA
ttctctcaattttctaggggg

SEQ ID NO: 12335 - RNA, 21 nt, synthetic construct
  misc_feature 1..21: note = HBV-targeting guide sequence portion
  source 1..21: mol_type = other RNA
ttctctgcctgccgttccgac

SEQ ID NO: 12336 - RNA, 21 nt, synthetic construct
  misc_feature 1..21: note = HBV-targeting guide sequence portion
  source 1..21: mol_type = other RNA
ttctcttaatttcatgggcta

SEQ ID NO: 12337 - RNA, 21 nt, synthetic construct
  misc_feature 1..21: note = HBV-targeting guide sequence portion
  source 1..21: mol_type = other RNA
ttctcttccaaaagtaagaca

SEQ ID NO: 12338 - RNA, 21 nt, synthetic construct
  misc_feature 1..21: note = HBV-targeting guide sequence portion
  source 1..21: mol_type = other RNA
ttctcttggctcagtttacta

SEQ ID NO: 12339 - RNA, 21 nt, synthetic construct
  misc_feature 1..21: note = HBV-targeting guide sequence portion
  source 1..21: mol_type = other RNA
ttctgaaacattctttgattt

SEQ ID NO: 12340 - RNA, 21 nt, synthetic construct
  misc_feature 1..21: note = HBV-targeting guide sequence portion
  source 1..21: mol_type = other RNA
ttctgacttctttccttccgt

SEQ ID NO: 12341 - RNA, 21 nt, synthetic construct
  misc_feature 1..21: note = HBV-targeting guide sequence portion
  source 1..21: mol_type = other RNA
ttctgcagggtcccgtgctgg

SEQ ID NO: 12342 - RNA, 21 nt, synthetic construct
  misc_feature 1..21: note = HBV-targeting guide sequence portion
  source 1..21: mol_type = other RNA
ttctgccccatgctgtagctc

SEQ ID NO: 12343 - RNA, 21 nt, synthetic construct
  misc_feature 1..21: note = HBV-targeting guide sequence portion
  source 1..21: mol_type = other RNA
ttctgcgacgcggcgattgag

SEQ ID NO: 12344 - RNA, 21 nt, synthetic construct
  misc_feature 1..21: note = HBV-targeting guide sequence portion
  source 1..21: mol_type = other RNA
ttctggactatcaaggtatgt

SEQ ID NO: 12345 - RNA, 21 nt, synthetic construct
  misc_feature 1..21: note = HBV-targeting guide sequence portion
  source 1..21: mol_type = other RNA
ttctggataataaggtttaat

SEQ ID NO: 12346 - RNA, 21 nt, synthetic construct
  misc_feature 1..21: note = HBV-targeting guide sequence portion
  source 1..21: mol_type = other RNA
ttctgggttttgctgcccctt

SEQ ID NO: 12347 - RNA, 21 nt, synthetic construct
  misc_feature 1..21: note = HBV-targeting guide sequence portion
  source 1..21: mol_type = other RNA
ttctgtgggtcaccatattct

SEQ ID NO: 12348 - RNA, 21 nt, synthetic construct
  misc_feature 1..21: note = HBV-targeting guide sequence portion
  source 1..21: mol_type = other RNA
ttctgtgtaaacaatacctga

SEQ ID NO: 12349 - RNA, 21 nt, synthetic construct
  misc_feature 1..21: note = HBV-targeting guide sequence portion
  source 1..21: mol_type = other RNA
ttcttctactgtacctgtctt

SEQ ID NO: 12350 - RNA, 21 nt, synthetic construct
  misc_feature 1..21: note = HBV-targeting guide sequence portion
  source 1..21: mol_type = other RNA
ttcttctaggggacctgcctc

SEQ ID NO: 12351 - RNA, 21 nt, synthetic construct
  misc_feature 1..21: note = HBV-targeting guide sequence portion
  source 1..21: mol_type = other RNA
ttcttctggactatcaaggta

SEQ ID NO: 12352 - RNA, 21 nt, synthetic construct
  misc_feature 1..21: note = HBV-targeting guide sequence portion
  source 1..21: mol_type = other RNA
ttcttcttctaggggacctgc

SEQ ID NO: 12353 - RNA, 21 nt, synthetic construct
  misc_feature 1..21: note = HBV-targeting guide sequence portion
  source 1..21: mol_type = other RNA
ttcttgcccaaggtcttacat

SEQ ID NO: 12354 - RNA, 21 nt, synthetic construct
  misc_feature 1..21: note = HBV-targeting guide sequence portion
  source 1..21: mol_type = other RNA
ttcttgggaacaagagctaca

SEQ ID NO: 12355 - RNA, 21 nt, synthetic construct
  misc_feature 1..21: note = HBV-targeting guide sequence portion
  source 1..21: mol_type = other RNA
ttcttgtcaacaaggaaaacc

SEQ ID NO: 12356 - RNA, 21 nt, synthetic construct
  misc_feature 1..21: note = HBV-targeting guide sequence portion
  source 1..21: mol_type = other RNA
ttcttgtcttacttttggaag

SEQ ID NO: 12357 - RNA, 21 nt, synthetic construct
  misc_feature 1..21: note = HBV-targeting guide sequence portion
  source 1..21: mol_type = other RNA
ttcttgttggttcttctggac

SEQ ID NO: 12358 - RNA, 21 nt, synthetic construct
  misc_feature 1..21: note = HBV-targeting guide sequence portion
  source 1..21: mol_type = other RNA
ttctttatatgggtcaatgtc

SEQ ID NO: 12359 - RNA, 21 nt, synthetic construct
  misc_feature 1..21: note = HBV-targeting guide sequence portion
  source 1..21: mol_type = other RNA
ttctttcccgaccaccagttg

SEQ ID NO: 12360 - RNA, 21 nt, synthetic construct
  misc_feature 1..21: note = HBV-targeting guide sequence portion
  source 1..21: mol_type = other RNA
ttctttccttccgtacgagat

SEQ ID NO: 12361 - RNA, 21 nt, synthetic construct
  misc_feature 1..21: note = HBV-targeting guide sequence portion
  source 1..21: mol_type = other RNA
ttctttgattttgtgtatgat

SEQ ID NO: 12362 - RNA, 21 nt, synthetic construct
  misc_feature 1..21: note = HBV-targeting guide sequence portion
  source 1..21: mol_type = other RNA
ttctttgctggggagaactaa

SEQ ID NO: 12363 - RNA, 21 nt, synthetic construct
  misc_feature 1..21: note = HBV-targeting guide sequence portion
  source 1..21: mol_type = other RNA
ttcttttgtctttgggtgtac

SEQ ID NO: 12364 - RNA, 21 nt, synthetic construct
  misc_feature 1..21: note = HBV-targeting guide sequence portion
  source 1..21: mol_type = other RNA
ttgaaattgattatgcctgct

SEQ ID NO: 12365 - RNA, 21 nt, synthetic construct
  misc_feature 1..21: note = HBV-targeting guide sequence portion
  source 1..21: mol_type = other RNA
ttgaacagtaggacatgaaca

SEQ ID NO: 12366 - RNA, 21 nt, synthetic construct
  misc_feature 1..21: note = HBV-targeting guide sequence portion
  source 1..21: mol_type = other RNA
ttgaagtatgcctcaaggtcg

SEQ ID NO: 12367 - RNA, 21 nt, synthetic construct
  misc_feature 1..21: note = HBV-targeting guide sequence portion
  source 1..21: mol_type = other RNA
ttgaagtcccaatctggattg

SEQ ID NO: 12368 - RNA, 21 nt, synthetic construct
  misc_feature 1..21: note = HBV-targeting guide sequence portion
  source 1..21: mol_type = other RNA
ttgaatacatgcatacaaggg

SEQ ID NO: 12369 - RNA, 21 nt, synthetic construct
  misc_feature 1..21: note = HBV-targeting guide sequence portion
  source 1..21: mol_type = other RNA
ttgacaagaatcctcacaata

SEQ ID NO: 12370 - RNA, 21 nt, synthetic construct
  misc_feature 1..21: note = HBV-targeting guide sequence portion
  source 1..21: mol_type = other RNA
ttgacacactttccaatcaat

SEQ ID NO: 12371 - RNA, 21 nt, synthetic construct
  misc_feature 1..21: note = HBV-targeting guide sequence portion
  source 1..21: mol_type = other RNA
ttgacactctcttatataaaa

SEQ ID NO: 12372 - RNA, 21 nt, synthetic construct
  misc_feature 1..21: note = HBV-targeting guide sequence portion
  source 1..21: mol_type = other RNA
ttgacataactgactactagg

SEQ ID NO: 12373 - RNA, 21 nt, synthetic construct
  misc_feature 1..21: note = HBV-targeting guide sequence portion
  source 1..21: mol_type = other RNA
ttgacattgcagagagtccaa

SEQ ID NO: 12374 - RNA, 21 nt, synthetic construct
  misc_feature 1..21: note = HBV-targeting guide sequence portion
  source 1..21: mol_type = other RNA
ttgacccatataaagaatttg

SEQ ID NO: 12375 - RNA, 21 nt, synthetic construct
  misc_feature 1..21: note = HBV-targeting guide sequence portion
  source 1..21: mol_type = other RNA
ttgacgatatgtgagaggcag

SEQ ID NO: 12376 - RNA, 21 nt, synthetic construct
  misc_feature 1..21: note = HBV-targeting guide sequence portion
  source 1..21: mol_type = other RNA
ttgagagaagtccaccacgag

SEQ ID NO: 12377 - RNA, 21 nt, synthetic construct
  misc_feature 1..21: note = HBV-targeting guide sequence portion
  source 1..21: mol_type = other RNA
ttgagatccccgagattgaga

SEQ ID NO: 12378 - RNA, 21 nt, synthetic construct
  misc_feature 1..21: note = HBV-targeting guide sequence portion
  source 1..21: mol_type = other RNA
ttgagatcttcgtctgcgagg

SEQ ID NO: 12379 - RNA, 21 nt, synthetic construct
  misc_feature 1..21: note = HBV-targeting guide sequence portion
  source 1..21: mol_type = other RNA
ttgagatcttctgcgacgcgg

SEQ ID NO: 12380 - RNA, 21 nt, synthetic construct
  misc_feature 1..21: note = HBV-targeting guide sequence portion
  source 1..21: mol_type = other RNA
ttgagcaggagtcgtgcaggt

SEQ ID NO: 12381 - RNA, 21 nt, synthetic construct
  misc_feature 1..21: note = HBV-targeting guide sequence portion
  source 1..21: mol_type = other RNA
ttgaggcatacttcaaagact

SEQ ID NO: 12382 - RNA, 21 nt, synthetic construct
  misc_feature 1..21: note = HBV-targeting guide sequence portion
  source 1..21: mol_type = other RNA
ttgagtccctttataccgctg

SEQ ID NO: 12383 - RNA, 21 nt, synthetic construct
  misc_feature 1..21: note = HBV-targeting guide sequence portion
  source 1..21: mol_type = other RNA
ttgataatatcttggtgtaga

SEQ ID NO: 12384 - RNA, 21 nt, synthetic construct
  misc_feature 1..21: note = HBV-targeting guide sequence portion
  source 1..21: mol_type = other RNA
ttgataggataggggcatttg

SEQ ID NO: 12385 - RNA, 21 nt, synthetic construct
  misc_feature 1..21: note = HBV-targeting guide sequence portion
  source 1..21: mol_type = other RNA
ttgatagtccagaagaaccaa

SEQ ID NO: 12386 - RNA, 21 nt, synthetic construct
  misc_feature 1..21: note = HBV-targeting guide sequence portion
  source 1..21: mol_type = other RNA
ttgatcttctaaattagtacc

SEQ ID NO: 12387 - RNA, 21 nt, synthetic construct
  misc_feature 1..21: note = HBV-targeting guide sequence portion
  source 1..21: mol_type = other RNA
ttgatgatcctggaattagag

SEQ ID NO: 12388 - RNA, 21 nt, synthetic construct
  misc_feature 1..21: note = HBV-targeting guide sequence portion
  source 1..21: mol_type = other RNA
ttgattatgcctgctaggttt

SEQ ID NO: 12389 - RNA, 21 nt, synthetic construct
  misc_feature 1..21: note = HBV-targeting guide sequence portion
  source 1..21: mol_type = other RNA
ttgattggaaagtgtgtcaac

SEQ ID NO: 12390 - RNA, 21 nt, synthetic construct
  misc_feature 1..21: note = HBV-targeting guide sequence portion
  source 1..21: mol_type = other RNA
ttgattgttggggatcattgc

SEQ ID NO: 12391 - RNA, 21 nt, synthetic construct
  misc_feature 1..21: note = HBV-targeting guide sequence portion
  source 1..21: mol_type = other RNA
ttgattttgtgtatgatgtga

SEQ ID NO: 12392 - RNA, 21 nt, synthetic construct
  misc_feature 1..21: note = HBV-targeting guide sequence portion
  source 1..21: mol_type = other RNA
ttgcagagagtccaagagtcc

SEQ ID NO: 12393 - RNA, 21 nt, synthetic construct
  misc_feature 1..21: note = HBV-targeting guide sequence portion
  source 1..21: mol_type = other RNA
ttgcagagtttggtggaaggt

SEQ ID NO: 12394 - RNA, 21 nt, synthetic construct
  misc_feature 1..21: note = HBV-targeting guide sequence portion
  source 1..21: mol_type = other RNA
ttgcatcagcaaacacttggc

SEQ ID NO: 12395 - RNA, 21 nt, synthetic construct
  misc_feature 1..21: note = HBV-targeting guide sequence portion
  source 1..21: mol_type = other RNA
ttgcatggtgctggtgcgcag

SEQ ID NO: 12396 - RNA, 21 nt, synthetic construct
  misc_feature 1..21: note = HBV-targeting guide sequence portion
  source 1..21: mol_type = other RNA
ttgcattatgccctgagcctg

SEQ ID NO: 12397 - RNA, 21 nt, synthetic construct
  misc_feature 1..21: note = HBV-targeting guide sequence portion
  source 1..21: mol_type = other RNA
ttgccacaaaatcacatcata

SEQ ID NO: 12398 - RNA, 21 nt, synthetic construct
  misc_feature 1..21: note = HBV-targeting guide sequence portion
  source 1..21: mol_type = other RNA
ttgccagcaaatccgcctcct

SEQ ID NO: 12399 - RNA, 21 nt, synthetic construct
  misc_feature 1..21: note = HBV-targeting guide sequence portion
  source 1..21: mol_type = other RNA
ttgccaggcaacggccaggtc

SEQ ID NO: 12400 - RNA, 21 nt, synthetic construct
  misc_feature 1..21: note = HBV-targeting guide sequence portion
  source 1..21: mol_type = other RNA
ttgcccaaggtcttacataag

SEQ ID NO: 12401 - RNA, 21 nt, synthetic construct
  misc_feature 1..21: note = HBV-targeting guide sequence portion
  source 1..21: mol_type = other RNA
ttgcccttggataagggtatt

SEQ ID NO: 12402 - RNA, 21 nt, synthetic construct
  misc_feature 1..21: note = HBV-targeting guide sequence portion
  source 1..21: mol_type = other RNA
ttgcctgagtgcagtatggtg

SEQ ID NO: 12403 - RNA, 21 nt, synthetic construct
  misc_feature 1..21: note = HBV-targeting guide sequence portion
  source 1..21: mol_type = other RNA
ttgcctggcaacggggtaaag

SEQ ID NO: 12404 - RNA, 21 nt, synthetic construct
  misc_feature 1..21: note = HBV-targeting guide sequence portion
  source 1..21: mol_type = other RNA
ttgccttctgacttctttcct

SEQ ID NO: 12405 - RNA, 21 nt, synthetic construct
  misc_feature 1..21: note = HBV-targeting guide sequence portion
  source 1..21: mol_type = other RNA
ttgcgggagaggacaacagag

SEQ ID NO: 12406 - RNA, 21 nt, synthetic construct
  misc_feature 1..21: note = HBV-targeting guide sequence portion
  source 1..21: mol_type = other RNA
ttgctccagaccggctgcgag

SEQ ID NO: 12407 - RNA, 21 nt, synthetic construct
  misc_feature 1..21: note = HBV-targeting guide sequence portion
  source 1..21: mol_type = other RNA
ttgctcgcagccggtctggag

SEQ ID NO: 12408 - RNA, 21 nt, synthetic construct
  misc_feature 1..21: note = HBV-targeting guide sequence portion
  source 1..21: mol_type = other RNA
ttgctctgaaggctgggtcca

SEQ ID NO: 12409 - RNA, 21 nt, synthetic construct
  misc_feature 1..21: note = HBV-targeting guide sequence portion
  source 1..21: mol_type = other RNA
ttgctgatgcaacccccactg

SEQ ID NO: 12410 - RNA, 21 nt, synthetic construct
  misc_feature 1..21: note = HBV-targeting guide sequence portion
  source 1..21: mol_type = other RNA
ttgctgccccttttacacaat

SEQ ID NO: 12411 - RNA, 21 nt, synthetic construct
  misc_feature 1..21: note = HBV-targeting guide sequence portion
  source 1..21: mol_type = other RNA
ttgctggcaaggtttgcatta

SEQ ID NO: 12412 - RNA, 21 nt, synthetic construct
  misc_feature 1..21: note = HBV-targeting guide sequence portion
  source 1..21: mol_type = other RNA
ttgctggggagaactaatgac

SEQ ID NO: 12413 - RNA, 21 nt, synthetic construct
  misc_feature 1..21: note = HBV-targeting guide sequence portion
  source 1..21: mol_type = other RNA
ttgctggtggaaagattctgc

SEQ ID NO: 12414 - RNA, 21 nt, synthetic construct
  misc_feature 1..21: note = HBV-targeting guide sequence portion
  source 1..21: mol_type = other RNA
ttgctgtacaaaaccttcgga

SEQ ID NO: 12415 - RNA, 21 nt, synthetic construct
  misc_feature 1..21: note = HBV-targeting guide sequence portion
  source 1..21: mol_type = other RNA
ttgcttgcctgagtgcagtat

SEQ ID NO: 12416 - RNA, 21 nt, synthetic construct
  misc_feature 1..21: note = HBV-targeting guide sequence portion
  source 1..21: mol_type = other RNA
ttggaaaacaccctcttttcc

SEQ ID NO: 12417 - RNA, 21 nt, synthetic construct
  misc_feature 1..21: note = HBV-targeting guide sequence portion
  source 1..21: mol_type = other RNA
ttggaaagtgtgtcaacgaat

SEQ ID NO: 12418 - RNA, 21 nt, synthetic construct
  misc_feature 1..21: note = HBV-targeting guide sequence portion
  source 1..21: mol_type = other RNA
ttggaagagaaacggtcctag

SEQ ID NO: 12419 - RNA, 21 nt, synthetic construct
  misc_feature 1..21: note = HBV-targeting guide sequence portion
  source 1..21: mol_type = other RNA
ttggaagtaatgattaactag

SEQ ID NO: 12420 - RNA, 21 nt, synthetic construct
  misc_feature 1..21: note = HBV-targeting guide sequence portion
  source 1..21: mol_type = other RNA
ttggacccagccttcagagca

SEQ ID NO: 12421 - RNA, 21 nt, synthetic construct
  misc_feature 1..21: note = HBV-targeting guide sequence portion
  source 1..21: mol_type = other RNA
ttggactcataaggtgggaaa

SEQ ID NO: 12422 - RNA, 21 nt, synthetic construct
  misc_feature 1..21: note = HBV-targeting guide sequence portion
  source 1..21: mol_type = other RNA
ttggactctctgcaatgtcaa

SEQ ID NO: 12423 - RNA, 21 nt, synthetic construct
  misc_feature 1..21: note = HBV-targeting guide sequence portion
  source 1..21: mol_type = other RNA
ttggagctactgtggagttac

SEQ ID NO: 12424 - RNA, 21 nt, synthetic construct
  misc_feature 1..21: note = HBV-targeting guide sequence portion
  source 1..21: mol_type = other RNA
ttggaggacaggaggttggtg

SEQ ID NO: 12425 - RNA, 21 nt, synthetic construct
  misc_feature 1..21: note = HBV-targeting guide sequence portion
  source 1..21: mol_type = other RNA
ttggaggcttgaacagtagga

SEQ ID NO: 12426 - RNA, 21 nt, synthetic construct
  misc_feature 1..21: note = HBV-targeting guide sequence portion
  source 1..21: mol_type = other RNA
ttggaggttggggactgcgaa

SEQ ID NO: 12427 - RNA, 21 nt, synthetic construct
  misc_feature 1..21: note = HBV-targeting guide sequence portion
  source 1..21: mol_type = other RNA
ttggagtctcctgagcattgt

SEQ ID NO: 12428 - RNA, 21 nt, synthetic construct
  misc_feature 1..21: note = HBV-targeting guide sequence portion
  source 1..21: mol_type = other RNA
ttggagtgtggattcgcactc

SEQ ID NO: 12429 - RNA, 21 nt, synthetic construct
  misc_feature 1..21: note = HBV-targeting guide sequence portion
  source 1..21: mol_type = other RNA
ttggagtttgctctgaaggct

SEQ ID NO: 12430 - RNA, 21 nt, synthetic construct
  misc_feature 1..21: note = HBV-targeting guide sequence portion
  source 1..21: mol_type = other RNA
ttggataagggtattaaacct

SEQ ID NO: 12431 - RNA, 21 nt, synthetic construct
  misc_feature 1..21: note = HBV-targeting guide sequence portion
  source 1..21: mol_type = other RNA
ttggcacagacctggccgttg

SEQ ID NO: 12432 - RNA, 21 nt, synthetic construct
  misc_feature 1..21: note = HBV-targeting guide sequence portion
  source 1..21: mol_type = other RNA
ttggcagcacagcctagcagc

SEQ ID NO: 12433 - RNA, 21 nt, synthetic construct
  misc_feature 1..21: note = HBV-targeting guide sequence portion
  source 1..21: mol_type = other RNA
ttggccaaaattcgcagtccc

SEQ ID NO: 12434 - RNA, 21 nt, synthetic construct
  misc_feature 1..21: note = HBV-targeting guide sequence portion
  source 1..21: mol_type = other RNA
ttggccaagacacacggtagt

SEQ ID NO: 12435 - RNA, 21 nt, synthetic construct
  misc_feature 1..21: note = HBV-targeting guide sequence portion
  source 1..21: mol_type = other RNA
ttggcccccaataccacatca

SEQ ID NO: 12436 - RNA, 21 nt, synthetic construct
  misc_feature 1..21: note = HBV-targeting guide sequence portion
  source 1..21: mol_type = other RNA
ttggcgaaaaagtgaaagcct

SEQ ID NO: 12437 - RNA, 21 nt, synthetic construct
  misc_feature 1..21: note = HBV-targeting guide sequence portion
  source 1..21: mol_type = other RNA
ttggcgtctggccagggatcc

SEQ ID NO: 12438 - RNA, 21 nt, synthetic construct
  misc_feature 1..21: note = HBV-targeting guide sequence portion
  source 1..21: mol_type = other RNA
ttggctcagtttactagtgcc

SEQ ID NO: 12439 - RNA, 21 nt, synthetic construct
  misc_feature 1..21: note = HBV-targeting guide sequence portion
  source 1..21: mol_type = other RNA
ttggctttcagttatatggat

SEQ ID NO: 12440 - RNA, 21 nt, synthetic construct
  misc_feature 1..21: note = HBV-targeting guide sequence portion
  source 1..21: mol_type = other RNA
ttgggaacaagagctacagca

SEQ ID NO: 12441 - RNA, 21 nt, synthetic construct
  misc_feature 1..21: note = HBV-targeting guide sequence portion
  source 1..21: mol_type = other RNA
ttgggacttcaatcccaacaa

SEQ ID NO: 12442 - RNA, 21 nt, synthetic construct
  misc_feature 1..21: note = HBV-targeting guide sequence portion
  source 1..21: mol_type = other RNA
ttgggattgaagtcccaatct

SEQ ID NO: 12443 - RNA, 21 nt, synthetic construct
  misc_feature 1..21: note = HBV-targeting guide sequence portion
  source 1..21: mol_type = other RNA
ttgggcaagaattggtgggcg

SEQ ID NO: 12444 - RNA, 21 nt, synthetic construct
  misc_feature 1..21: note = HBV-targeting guide sequence portion
  source 1..21: mol_type = other RNA
ttggggaccctgcgctgaaca

SEQ ID NO: 12445 - RNA, 21 nt, synthetic construct
  misc_feature 1..21: note = HBV-targeting guide sequence portion
  source 1..21: mol_type = other RNA
ttggggactgcgaattttggc

SEQ ID NO: 12446 - RNA, 21 nt, synthetic construct
  misc_feature 1..21: note = HBV-targeting guide sequence portion
  source 1..21: mol_type = other RNA
ttggggatcattgccacaaaa

SEQ ID NO: 12447 - RNA, 21 nt, synthetic construct
  misc_feature 1..21: note = HBV-targeting guide sequence portion
  source 1..21: mol_type = other RNA
ttggggccctgtcgtcctctt

SEQ ID NO: 12448 - RNA, 21 nt, synthetic construct
  misc_feature 1..21: note = HBV-targeting guide sequence portion
  source 1..21: mol_type = other RNA
ttggggcttggtcataggcca

SEQ ID NO: 12449 - RNA, 21 nt, synthetic construct
  misc_feature 1..21: note = HBV-targeting guide sequence portion
  source 1..21: mol_type = other RNA
ttgggggaggagattagatta

SEQ ID NO: 12450 - RNA, 21 nt, synthetic construct
  misc_feature 1..21: note = HBV-targeting guide sequence portion
  source 1..21: mol_type = other RNA
ttgggggccaagtctgtacag

SEQ ID NO: 12451 - RNA, 21 nt, synthetic construct
  misc_feature 1..21: note = HBV-targeting guide sequence portion
  source 1..21: mol_type = other RNA
ttggggtggagccctcaggct

SEQ ID NO: 12452 - RNA, 21 nt, synthetic construct
  misc_feature 1..21: note = HBV-targeting guide sequence portion
  source 1..21: mol_type = other RNA
ttgggtggctttagggcatgg

SEQ ID NO: 12453 - RNA, 21 nt, synthetic construct
  misc_feature 1..21: note = HBV-targeting guide sequence portion
  source 1..21: mol_type = other RNA
ttgggtgtacatttaaaccct

SEQ ID NO: 12454 - RNA, 21 nt, synthetic construct
  misc_feature 1..21: note = HBV-targeting guide sequence portion
  source 1..21: mol_type = other RNA
ttggtaacagcggtataaagg

SEQ ID NO: 12455 - RNA, 21 nt, synthetic construct
  misc_feature 1..21: note = HBV-targeting guide sequence portion
  source 1..21: mol_type = other RNA
ttggtagaggcaggaggcgga

SEQ ID NO: 12456 - RNA, 21 nt, synthetic construct
  misc_feature 1..21: note = HBV-targeting guide sequence portion
  source 1..21: mol_type = other RNA
ttggtcataggccatcagcgc

SEQ ID NO: 12457 - RNA, 21 nt, synthetic construct
  misc_feature 1..21: note = HBV-targeting guide sequence portion
  source 1..21: mol_type = other RNA
ttggtctgcgcaccagcacca

SEQ ID NO: 12458 - RNA, 21 nt, synthetic construct
  misc_feature 1..21: note = HBV-targeting guide sequence portion
  source 1..21: mol_type = other RNA
ttggtgaatttaggataaaac

SEQ ID NO: 12459 - RNA, 21 nt, synthetic construct
  misc_feature 1..21: note = HBV-targeting guide sequence portion
  source 1..21: mol_type = other RNA
ttggtgagtgattggaggttg

SEQ ID NO: 12460 - RNA, 21 nt, synthetic construct
  misc_feature 1..21: note = HBV-targeting guide sequence portion
  source 1..21: mol_type = other RNA
ttggtgggcgttcacggtggt

SEQ ID NO: 12461 - RNA, 21 nt, synthetic construct
  misc_feature 1..21: note = HBV-targeting guide sequence portion
  source 1..21: mol_type = other RNA
ttggtggtctataagctggag

SEQ ID NO: 12462 - RNA, 21 nt, synthetic construct
  misc_feature 1..21: note = HBV-targeting guide sequence portion
  source 1..21: mol_type = other RNA
ttggtgtagatgtatattagg

SEQ ID NO: 12463 - RNA, 21 nt, synthetic construct
  misc_feature 1..21: note = HBV-targeting guide sequence portion
  source 1..21: mol_type = other RNA
ttggtgtcttttggagtgtgg

SEQ ID NO: 12464 - RNA, 21 nt, synthetic construct
  misc_feature 1..21: note = HBV-targeting guide sequence portion
  source 1..21: mol_type = other RNA
ttggttcttctggactatcaa

SEQ ID NO: 12465 - RNA, 21 nt, synthetic construct
  misc_feature 1..21: note = HBV-targeting guide sequence portion
  source 1..21: mol_type = other RNA
ttgtaagttggcgaaaaagtg

SEQ ID NO: 12466 - RNA, 21 nt, synthetic construct
  misc_feature 1..21: note = HBV-targeting guide sequence portion
  source 1..21: mol_type = other RNA
ttgtacagcaacaggagggat

SEQ ID NO: 12467 - RNA, 21 nt, synthetic construct
  misc_feature 1..21: note = HBV-targeting guide sequence portion
  source 1..21: mol_type = other RNA
ttgtactaggaggctgtaggc

SEQ ID NO: 12468 - RNA, 21 nt, synthetic construct
  misc_feature 1..21: note = HBV-targeting guide sequence portion
  source 1..21: mol_type = other RNA
ttgtaggcccgcttacagtta

SEQ ID NO: 12469 - RNA, 21 nt, synthetic construct
  misc_feature 1..21: note = HBV-targeting guide sequence portion
  source 1..21: mol_type = other RNA
ttgtatgcatgtattcaatct

SEQ ID NO: 12470 - RNA, 21 nt, synthetic construct
  misc_feature 1..21: note = HBV-targeting guide sequence portion
  source 1..21: mol_type = other RNA
ttgtcaacaaggaaaaccccg

SEQ ID NO: 12471 - RNA, 21 nt, synthetic construct
  misc_feature 1..21: note = HBV-targeting guide sequence portion
  source 1..21: mol_type = other RNA
ttgtcagtcccgagaatgttt

SEQ ID NO: 12472 - RNA, 21 nt, synthetic construct
  misc_feature 1..21: note = HBV-targeting guide sequence portion
  source 1..21: mol_type = other RNA
ttgtcctctcccgcaaatata

SEQ ID NO: 12473 - RNA, 21 nt, synthetic construct
  misc_feature 1..21: note = HBV-targeting guide sequence portion
  source 1..21: mol_type = other RNA
ttgtcctggttatcgctggat

SEQ ID NO: 12474 - RNA, 21 nt, synthetic construct
  misc_feature 1..21: note = HBV-targeting guide sequence portion
  source 1..21: mol_type = other RNA
ttgtctgaactttaggcccat

SEQ ID NO: 12475 - RNA, 21 nt, synthetic construct
  misc_feature 1..21: note = HBV-targeting guide sequence portion
  source 1..21: mol_type = other RNA
ttgtcttacttttggaagaga

SEQ ID NO: 12476 - RNA, 21 nt, synthetic construct
  misc_feature 1..21: note = HBV-targeting guide sequence portion
  source 1..21: mol_type = other RNA
ttgtctttgggtgtacattta

SEQ ID NO: 12477 - RNA, 21 nt, synthetic construct
  misc_feature 1..21: note = HBV-targeting guide sequence portion
  source 1..21: mol_type = other RNA
ttgtgaggattcttgtcaaca

SEQ ID NO: 12478 - RNA, 21 nt, synthetic construct
  misc_feature 1..21: note = HBV-targeting guide sequence portion
  source 1..21: mol_type = other RNA
ttgtggcaatgatccccaaca

SEQ ID NO: 12479 - RNA, 21 nt, synthetic construct
  misc_feature 1..21: note = HBV-targeting guide sequence portion
  source 1..21: mol_type = other RNA
ttgtgggtcttctgggttttg

SEQ ID NO: 12480 - RNA, 21 nt, synthetic construct
  misc_feature 1..21: note = HBV-targeting guide sequence portion
  source 1..21: mol_type = other RNA
ttgtggtttcacatttcttgt

SEQ ID NO: 12481 - RNA, 21 nt, synthetic construct
  misc_feature 1..21: note = HBV-targeting guide sequence portion
  source 1..21: mol_type = other RNA
ttgtgtaaaaggggcagcaaa

SEQ ID NO: 12482 - RNA, 21 nt, synthetic construct
  misc_feature 1..21: note = HBV-targeting guide sequence portion
  source 1..21: mol_type = other RNA
ttgtgtatgatgtgattttgt

SEQ ID NO: 12483 - RNA, 21 nt, synthetic construct
  misc_feature 1..21: note = HBV-targeting guide sequence portion
  source 1..21: mol_type = other RNA
ttgtgttgttagacgacgagg

SEQ ID NO: 12484 - RNA, 21 nt, synthetic construct
  misc_feature 1..21: note = HBV-targeting guide sequence portion
  source 1..21: mol_type = other RNA
ttgttagacgacgaggcaggt

SEQ ID NO: 12485 - RNA, 21 nt, synthetic construct
  misc_feature 1..21: note = HBV-targeting guide sequence portion
  source 1..21: mol_type = other RNA
ttgttagggtttaaatgtaca

SEQ ID NO: 12486 - RNA, 21 nt, synthetic construct
  misc_feature 1..21: note = HBV-targeting guide sequence portion
  source 1..21: mol_type = other RNA
ttgttcacctcaccatactgc

SEQ ID NO: 12487 - RNA, 21 nt, synthetic construct
  misc_feature 1..21: note = HBV-targeting guide sequence portion
  source 1..21: mol_type = other RNA
ttgttcagtggttcgtagggc

SEQ ID NO: 12488 - RNA, 21 nt, synthetic construct
  misc_feature 1..21: note = HBV-targeting guide sequence portion
  source 1..21: mol_type = other RNA
ttgttcatgtcctactgttca

SEQ ID NO: 12489 - RNA, 21 nt, synthetic construct
  misc_feature 1..21: note = HBV-targeting guide sequence portion
  source 1..21: mol_type = other RNA
ttgttcccaagaatatggtga

SEQ ID NO: 12490 - RNA, 21 nt, synthetic construct
  misc_feature 1..21: note = HBV-targeting guide sequence portion
  source 1..21: mol_type = other RNA
ttgttgacaagaatcctcaca

SEQ ID NO: 12491 - RNA, 21 nt, synthetic construct
  misc_feature 1..21: note = HBV-targeting guide sequence portion
  source 1..21: mol_type = other RNA
ttgttggagtttgctctgaag

SEQ ID NO: 12492 - RNA, 21 nt, synthetic construct
  misc_feature 1..21: note = HBV-targeting guide sequence portion
  source 1..21: mol_type = other RNA
ttgttggcgtctggccaggga

SEQ ID NO: 12493 - RNA, 21 nt, synthetic construct
  misc_feature 1..21: note = HBV-targeting guide sequence portion
  source 1..21: mol_type = other RNA
ttgttgggattgaagtcccaa

SEQ ID NO: 12494 - RNA, 21 nt, synthetic construct
  misc_feature 1..21: note = HBV-targeting guide sequence portion
  source 1..21: mol_type = other RNA
ttgttggggatcattgccaca

SEQ ID NO: 12495 - RNA, 21 nt, synthetic construct
  misc_feature 1..21: note = HBV-targeting guide sequence portion
  source 1..21: mol_type = other RNA
ttgttggttcttctggactat

SEQ ID NO: 12496 - RNA, 21 nt, synthetic construct
  misc_feature 1..21: note = HBV-targeting guide sequence portion
  source 1..21: mol_type = other RNA
ttgtttaaagactgggaggag

SEQ ID NO: 12497 - RNA, 21 nt, synthetic construct
  misc_feature 1..21: note = HBV-targeting guide sequence portion
  source 1..21: mol_type = other RNA
ttgtttacacagaaaggcctt

SEQ ID NO: 12498 - RNA, 21 nt, synthetic construct
  misc_feature 1..21: note = HBV-targeting guide sequence portion
  source 1..21: mol_type = other RNA
ttgtttacgtcccgtcggcgc

SEQ ID NO: 12499 - RNA, 21 nt, synthetic construct
  misc_feature 1..21: note = HBV-targeting guide sequence portion
  source 1..21: mol_type = other RNA
ttgttttgctcgcagccggtc

SEQ ID NO: 12500 - RNA, 21 nt, synthetic construct
  misc_feature 1..21: note = HBV-targeting guide sequence portion
  source 1..21: mol_type = other RNA
ttgttttgttagggtttaaat

SEQ ID NO: 12501 - RNA, 21 nt, synthetic construct
  misc_feature 1..21: note = HBV-targeting guide sequence portion
  source 1..21: mol_type = other RNA
tttaaacaaacagtctttgaa

SEQ ID NO: 12502 - RNA, 21 nt, synthetic construct
  misc_feature 1..21: note = HBV-targeting guide sequence portion
  source 1..21: mol_type = other RNA
tttaaaccctaacaaaacaaa

SEQ ID NO: 12503 - RNA, 21 nt, synthetic construct
  misc_feature 1..21: note = HBV-targeting guide sequence portion
  source 1..21: mol_type = other RNA
tttaaagactgggaggagttg

SEQ ID NO: 12504 - RNA, 21 nt, synthetic construct
  misc_feature 1..21: note = HBV-targeting guide sequence portion
  source 1..21: mol_type = other RNA
tttaaatgtacacccaaagac

SEQ ID NO: 12505 - RNA, 21 nt, synthetic construct
  misc_feature 1..21: note = HBV-targeting guide sequence portion
  source 1..21: mol_type = other RNA
tttaaccctcattggaaaaca

SEQ ID NO: 12506 - RNA, 21 nt, synthetic construct
  misc_feature 1..21: note = HBV-targeting guide sequence portion
  source 1..21: mol_type = other RNA
tttaatacccttatccaaggg

SEQ ID NO: 12507 - RNA, 21 nt, synthetic construct
  misc_feature 1..21: note = HBV-targeting guide sequence portion
  source 1..21: mol_type = other RNA
tttaatgcccttgtatgcatg

SEQ ID NO: 12508 - RNA, 21 nt, synthetic construct
  misc_feature 1..21: note = HBV-targeting guide sequence portion
  source 1..21: mol_type = other RNA
tttacacaatgtggttatcct

SEQ ID NO: 12509 - RNA, 21 nt, synthetic construct
  misc_feature 1..21: note = HBV-targeting guide sequence portion
  source 1..21: mol_type = other RNA
tttacacactctatggaaggc

SEQ ID NO: 12510 - RNA, 21 nt, synthetic construct
  misc_feature 1..21: note = HBV-targeting guide sequence portion
  source 1..21: mol_type = other RNA
tttacacagaaaggccttgta

SEQ ID NO: 12511 - RNA, 21 nt, synthetic construct
  misc_feature 1..21: note = HBV-targeting guide sequence portion
  source 1..21: mol_type = other RNA
tttaccccgttgccaggcaac

SEQ ID NO: 12512 - RNA, 21 nt, synthetic construct
  misc_feature 1..21: note = HBV-targeting guide sequence portion
  source 1..21: mol_type = other RNA
tttacgcggactccccgtctg

SEQ ID NO: 12513 - RNA, 21 nt, synthetic construct
  misc_feature 1..21: note = HBV-targeting guide sequence portion
  source 1..21: mol_type = other RNA
tttacggggctttattcttct

SEQ ID NO: 12514 - RNA, 21 nt, synthetic construct
  misc_feature 1..21: note = HBV-targeting guide sequence portion
  source 1..21: mol_type = other RNA
tttacgtcccgtcggcgctga

SEQ ID NO: 12515 - RNA, 21 nt, synthetic construct
  misc_feature 1..21: note = HBV-targeting guide sequence portion
  source 1..21: mol_type = other RNA
tttactagtgccatttgttca

SEQ ID NO: 12516 - RNA, 21 nt, synthetic construct
  misc_feature 1..21: note = HBV-targeting guide sequence portion
  source 1..21: mol_type = other RNA
tttactgttcctgaactggag

SEQ ID NO: 12517 - RNA, 21 nt, synthetic construct
  misc_feature 1..21: note = HBV-targeting guide sequence portion
  source 1..21: mol_type = other RNA
tttagaagatcaagcatctag

SEQ ID NO: 12518 - RNA, 21 nt, synthetic construct
  misc_feature 1..21: note = HBV-targeting guide sequence portion
  source 1..21: mol_type = other RNA
tttaggataaaacctagcagg

SEQ ID NO: 12519 - RNA, 21 nt, synthetic construct
  misc_feature 1..21: note = HBV-targeting guide sequence portion
  source 1..21: mol_type = other RNA
tttaggcccatatgagtgttg

SEQ ID NO: 12520 - RNA, 21 nt, synthetic construct
  misc_feature 1..21: note = HBV-targeting guide sequence portion
  source 1..21: mol_type = other RNA
tttagggcatggacattgacc

SEQ ID NO: 12521 - RNA, 21 nt, synthetic construct
  misc_feature 1..21: note = HBV-targeting guide sequence portion
  source 1..21: mol_type = other RNA
tttataccgctgttaccaatt

SEQ ID NO: 12522 - RNA, 21 nt, synthetic construct
  misc_feature 1..21: note = HBV-targeting guide sequence portion
  source 1..21: mol_type = other RNA
tttatataagagagtgtcaac

SEQ ID NO: 12523 - RNA, 21 nt, synthetic construct
  misc_feature 1..21: note = HBV-targeting guide sequence portion
  source 1..21: mol_type = other RNA
tttatatgggtcaatgtccat

SEQ ID NO: 12524 - RNA, 21 nt, synthetic construct
  misc_feature 1..21: note = HBV-targeting guide sequence portion
  source 1..21: mol_type = other RNA
tttatcatcttcctcttcatc

SEQ ID NO: 12525 - RNA, 21 nt, synthetic construct
  misc_feature 1..21: note = HBV-targeting guide sequence portion
  source 1..21: mol_type = other RNA
tttatcctaaattcaccaaat

SEQ ID NO: 12526 - RNA, 21 nt, synthetic construct
  misc_feature 1..21: note = HBV-targeting guide sequence portion
  source 1..21: mol_type = other RNA
tttatgcctacagcctcctag

SEQ ID NO: 12527 - RNA, 21 nt, synthetic construct
  misc_feature 1..21: note = HBV-targeting guide sequence portion
  source 1..21: mol_type = other RNA
tttattcttctactgtacctg

SEQ ID NO: 12528 - RNA, 21 nt, synthetic construct
  misc_feature 1..21: note = HBV-targeting guide sequence portion
  source 1..21: mol_type = other RNA
tttcaaccgtcttttctcatt

SEQ ID NO: 12529 - RNA, 21 nt, synthetic construct
  misc_feature 1..21: note = HBV-targeting guide sequence portion
  source 1..21: mol_type = other RNA
tttcacatttcttgtcttact

SEQ ID NO: 12530 - RNA, 21 nt, synthetic construct
  misc_feature 1..21: note = HBV-targeting guide sequence portion
  source 1..21: mol_type = other RNA
tttcacctctgcctaatcatc

SEQ ID NO: 12531 - RNA, 21 nt, synthetic construct
  misc_feature 1..21: note = HBV-targeting guide sequence portion
  source 1..21: mol_type = other RNA
tttcactttttcgccaactta

SEQ ID NO: 12532 - RNA, 21 nt, synthetic construct
  misc_feature 1..21: note = HBV-targeting guide sequence portion
  source 1..21: mol_type = other RNA
tttcagaaaactcccggttaa

SEQ ID NO: 12533 - RNA, 21 nt, synthetic construct
  misc_feature 1..21: note = HBV-targeting guide sequence portion
  source 1..21: mol_type = other RNA
tttcagttatatggatgatgt

SEQ ID NO: 12534 - RNA, 21 nt, synthetic construct
  misc_feature 1..21: note = HBV-targeting guide sequence portion
  source 1..21: mol_type = other RNA
tttcatgggctatgtcattga

SEQ ID NO: 12535 - RNA, 21 nt, synthetic construct
  misc_feature 1..21: note = HBV-targeting guide sequence portion
  source 1..21: mol_type = other RNA
tttccaatcaataggcctgtt

SEQ ID NO: 12536 - RNA, 21 nt, synthetic construct
  misc_feature 1..21: note = HBV-targeting guide sequence portion
  source 1..21: mol_type = other RNA
tttccaatgagggttaaagac

SEQ ID NO: 12537 - RNA, 21 nt, synthetic construct
  misc_feature 1..21: note = HBV-targeting guide sequence portion
  source 1..21: mol_type = other RNA
tttccaccagcaatcctctgg

SEQ ID NO: 12538 - RNA, 21 nt, synthetic construct
  misc_feature 1..21: note = HBV-targeting guide sequence portion
  source 1..21: mol_type = other RNA
tttccatccgaaggttttgta

SEQ ID NO: 12539 - RNA, 21 nt, synthetic construct
  misc_feature 1..21: note = HBV-targeting guide sequence portion
  source 1..21: mol_type = other RNA
tttcccaccttatgagtccaa

SEQ ID NO: 12540 - RNA, 21 nt, synthetic construct
  misc_feature 1..21: note = HBV-targeting guide sequence portion
  source 1..21: mol_type = other RNA
tttcccccactgtttggcttt

SEQ ID NO: 12541 - RNA, 21 nt, synthetic construct
  misc_feature 1..21: note = HBV-targeting guide sequence portion
  source 1..21: mol_type = other RNA
tttcccgaccaccagttggac

SEQ ID NO: 12542 - RNA, 21 nt, synthetic construct
  misc_feature 1..21: note = HBV-targeting guide sequence portion
  source 1..21: mol_type = other RNA
tttcccgtctgtcctctaatt

SEQ ID NO: 12543 - RNA, 21 nt, synthetic construct
  misc_feature 1..21: note = HBV-targeting guide sequence portion
  source 1..21: mol_type = other RNA
tttccgaaagcccaggatgat

SEQ ID NO: 12544 - RNA, 21 nt, synthetic construct
  misc_feature 1..21: note = HBV-targeting guide sequence portion
  source 1..21: mol_type = other RNA
tttccggctcctctgccgatc

SEQ ID NO: 12545 - RNA, 21 nt, synthetic construct
  misc_feature 1..21: note = HBV-targeting guide sequence portion
  source 1..21: mol_type = other RNA
tttcctaatatacatctacac

SEQ ID NO: 12546 - RNA, 21 nt, synthetic construct
  misc_feature 1..21: note = HBV-targeting guide sequence portion
  source 1..21: mol_type = other RNA
tttccttccgtacgagatctt

SEQ ID NO: 12547 - RNA, 21 nt, synthetic construct
  misc_feature 1..21: note = HBV-targeting guide sequence portion
  source 1..21: mol_type = other RNA
tttccttgttgacaagaatcc

SEQ ID NO: 12548 - RNA, 21 nt, synthetic construct
  misc_feature 1..21: note = HBV-targeting guide sequence portion
  source 1..21: mol_type = other RNA
tttcgccaacttacaaggcct

SEQ ID NO: 12549 - RNA, 21 nt, synthetic construct
  misc_feature 1..21: note = HBV-targeting guide sequence portion
  source 1..21: mol_type = other RNA
tttcggaaaattcctatggga

SEQ ID NO: 12550 - RNA, 21 nt, synthetic construct
  misc_feature 1..21: note = HBV-targeting guide sequence portion
  source 1..21: mol_type = other RNA
tttctagggggaactaccgtg

SEQ ID NO: 12551 - RNA, 21 nt, synthetic construct
  misc_feature 1..21: note = HBV-targeting guide sequence portion
  source 1..21: mol_type = other RNA
tttctcagaggtggagacagc

SEQ ID NO: 12552 - RNA, 21 nt, synthetic construct
  misc_feature 1..21: note = HBV-targeting guide sequence portion
  source 1..21: mol_type = other RNA
tttctcattaactgtaagcgg

SEQ ID NO: 12553 - RNA, 21 nt, synthetic construct
  misc_feature 1..21: note = HBV-targeting guide sequence portion
  source 1..21: mol_type = other RNA
tttctcttccaaaagtaagac

SEQ ID NO: 12554 - RNA, 21 nt, synthetic construct
  misc_feature 1..21: note = HBV-targeting guide sequence portion
  source 1..21: mol_type = other RNA
tttctcttggctcagtttact

SEQ ID NO: 12555 - RNA, 21 nt, synthetic construct
  misc_feature 1..21: note = HBV-targeting guide sequence portion
  source 1..21: mol_type = other RNA
tttctgaaacattctttgatt

SEQ ID NO: 12556 - RNA, 21 nt, synthetic construct
  misc_feature 1..21: note = HBV-targeting guide sequence portion
  source 1..21: mol_type = other RNA
tttctgtgtaaacaatacctg

SEQ ID NO: 12557 - RNA, 21 nt, synthetic construct
  misc_feature 1..21: note = HBV-targeting guide sequence portion
  source 1..21: mol_type = other RNA
tttcttgtcttacttttggaa

SEQ ID NO: 12558 - RNA, 21 nt, synthetic construct
  misc_feature 1..21: note = HBV-targeting guide sequence portion
  source 1..21: mol_type = other RNA
tttcttttgtctttgggtgta

SEQ ID NO: 12559 - RNA, 21 nt, synthetic construct
  misc_feature 1..21: note = HBV-targeting guide sequence portion
  source 1..21: mol_type = other RNA
tttgaagtatgcctcaaggtc

SEQ ID NO: 12560 - RNA, 21 nt, synthetic construct
  misc_feature 1..21: note = HBV-targeting guide sequence portion
  source 1..21: mol_type = other RNA
tttgataatatcttggtgtag

SEQ ID NO: 12561 - RNA, 21 nt, synthetic construct
  misc_feature 1..21: note = HBV-targeting guide sequence portion
  source 1..21: mol_type = other RNA
tttgattttgtgtatgatgtg

SEQ ID NO: 12562 - RNA, 21 nt, synthetic construct
  misc_feature 1..21: note = HBV-targeting guide sequence portion
  source 1..21: mol_type = other RNA
tttgcattatgccctgagcct

SEQ ID NO: 12563 - RNA, 21 nt, synthetic construct
  misc_feature 1..21: note = HBV-targeting guide sequence portion
  source 1..21: mol_type = other RNA
tttgccttctgacttctttcc

SEQ ID NO: 12564 - RNA, 21 nt, synthetic construct
  misc_feature 1..21: note = HBV-targeting guide sequence portion
  source 1..21: mol_type = other RNA
tttgcgggagaggacaacaga

SEQ ID NO: 12565 - RNA, 21 nt, synthetic construct
  misc_feature 1..21: note = HBV-targeting guide sequence portion
  source 1..21: mol_type = other RNA
tttgctccagaccggctgcga

SEQ ID NO: 12566 - RNA, 21 nt, synthetic construct
  misc_feature 1..21: note = HBV-targeting guide sequence portion
  source 1..21: mol_type = other RNA
tttgctcgcagccggtctgga

SEQ ID NO: 12567 - RNA, 21 nt, synthetic construct
  misc_feature 1..21: note = HBV-targeting guide sequence portion
  source 1..21: mol_type = other RNA
tttgctctgaaggctgggtcc

SEQ ID NO: 12568 - RNA, 21 nt, synthetic construct
  misc_feature 1..21: note = HBV-targeting guide sequence portion
  source 1..21: mol_type = other RNA
tttgctgatgcaacccccact

SEQ ID NO: 12569 - RNA, 21 nt, synthetic construct
  misc_feature 1..21: note = HBV-targeting guide sequence portion
  source 1..21: mol_type = other RNA
tttgctgccccttttacacaa

SEQ ID NO: 12570 - RNA, 21 nt, synthetic construct
  misc_feature 1..21: note = HBV-targeting guide sequence portion
  source 1..21: mol_type = other RNA
tttgctggcaaggtttgcatt

SEQ ID NO: 12571 - RNA, 21 nt, synthetic construct
  misc_feature 1..21: note = HBV-targeting guide sequence portion
  source 1..21: mol_type = other RNA
tttgctggggagaactaatga

SEQ ID NO: 12572 - RNA, 21 nt, synthetic construct
  misc_feature 1..21: note = HBV-targeting guide sequence portion
  source 1..21: mol_type = other RNA
tttggaagagaaacggtccta

SEQ ID NO: 12573 - RNA, 21 nt, synthetic construct
  misc_feature 1..21: note = HBV-targeting guide sequence portion
  source 1..21: mol_type = other RNA
tttggaagtaatgattaacta

SEQ ID NO: 12574 - RNA, 21 nt, synthetic construct
  misc_feature 1..21: note = HBV-targeting guide sequence portion
  source 1..21: mol_type = other RNA
tttggagctactgtggagtta

SEQ ID NO: 12575 - RNA, 21 nt, synthetic construct
  misc_feature 1..21: note = HBV-targeting guide sequence portion
  source 1..21: mol_type = other RNA
tttggagtgtggattcgcact

SEQ ID NO: 12576 - RNA, 21 nt, synthetic construct
  misc_feature 1..21: note = HBV-targeting guide sequence portion
  source 1..21: mol_type = other RNA
tttggccaagacacacggtag

SEQ ID NO: 12577 - RNA, 21 nt, synthetic construct
  misc_feature 1..21: note = HBV-targeting guide sequence portion
  source 1..21: mol_type = other RNA
tttggctttcagttatatgga

SEQ ID NO: 12578 - RNA, 21 nt, synthetic construct
  misc_feature 1..21: note = HBV-targeting guide sequence portion
  source 1..21: mol_type = other RNA
tttggggtggagccctcaggc

SEQ ID NO: 12579 - RNA, 21 nt, synthetic construct
  misc_feature 1..21: note = HBV-targeting guide sequence portion
  source 1..21: mol_type = other RNA
tttgggtgtacatttaaaccc

SEQ ID NO: 12580 - RNA, 21 nt, synthetic construct
  misc_feature 1..21: note = HBV-targeting guide sequence portion
  source 1..21: mol_type = other RNA
tttggtgaatttaggataaaa

SEQ ID NO: 12581 - RNA, 21 nt, synthetic construct
  misc_feature 1..21: note = HBV-targeting guide sequence portion
  source 1..21: mol_type = other RNA
tttggtggtctataagctgga

SEQ ID NO: 12582 - RNA, 21 nt, synthetic construct
  misc_feature 1..21: note = HBV-targeting guide sequence portion
  source 1..21: mol_type = other RNA
tttggtgtcttttggagtgtg

SEQ ID NO: 12583 - RNA, 21 nt, synthetic construct
  misc_feature 1..21: note = HBV-targeting guide sequence portion
  source 1..21: mol_type = other RNA
tttgtacagcaacaggaggga

SEQ ID NO: 12584 - RNA, 21 nt, synthetic construct
  misc_feature 1..21: note = HBV-targeting guide sequence portion
  source 1..21: mol_type = other RNA
tttgtactaggaggctgtagg

SEQ ID NO: 12585 - RNA, 21 nt, synthetic construct
  misc_feature 1..21: note = HBV-targeting guide sequence portion
  source 1..21: mol_type = other RNA
tttgtaggcccgcttacagtt

SEQ ID NO: 12586 - RNA, 21 nt, synthetic construct
  misc_feature 1..21: note = HBV-targeting guide sequence portion
  source 1..21: mol_type = other RNA
tttgtctttgggtgtacattt

SEQ ID NO: 12587 - RNA, 21 nt, synthetic construct
  misc_feature 1..21: note = HBV-targeting guide sequence portion
  source 1..21: mol_type = other RNA
tttgtggcaatgatccccaac

SEQ ID NO: 12588 - RNA, 21 nt, synthetic construct
  misc_feature 1..21: note = HBV-targeting guide sequence portion
  source 1..21: mol_type = other RNA
tttgtgtatgatgtgattttg

SEQ ID NO: 12589 - RNA, 21 nt, synthetic construct
  misc_feature 1..21: note = HBV-targeting guide sequence portion
  source 1..21: mol_type = other RNA
tttgttagggtttaaatgtac

SEQ ID NO: 12590 - RNA, 21 nt, synthetic construct
  misc_feature 1..21: note = HBV-targeting guide sequence portion
  source 1..21: mol_type = other RNA
tttgttcagtggttcgtaggg

SEQ ID NO: 12591 - RNA, 21 nt, synthetic construct
  misc_feature 1..21: note = HBV-targeting guide sequence portion
  source 1..21: mol_type = other RNA
tttgtttaaagactgggagga

SEQ ID NO: 12592 - RNA, 21 nt, synthetic construct
  misc_feature 1..21: note = HBV-targeting guide sequence portion
  source 1..21: mol_type = other RNA
tttgtttacgtcccgtcggcg

SEQ ID NO: 12593 - RNA, 21 nt, synthetic construct
  misc_feature 1..21: note = HBV-targeting guide sequence portion
  source 1..21: mol_type = other RNA
tttgttttgttagggtttaaa

SEQ ID NO: 12594 - RNA, 21 nt, synthetic construct
  misc_feature 1..21: note = HBV-targeting guide sequence portion
  source 1..21: mol_type = other RNA
ttttacacaatgtggttatcc

SEQ ID NO: 12595 - RNA, 21 nt, synthetic construct
  misc_feature 1..21: note = HBV-targeting guide sequence portion
  source 1..21: mol_type = other RNA
ttttacggggctttattcttc

SEQ ID NO: 12596 - RNA, 21 nt, synthetic construct
  misc_feature 1..21: note = HBV-targeting guide sequence portion
  source 1..21: mol_type = other RNA
ttttatataagagagtgtcaa

SEQ ID NO: 12597 - RNA, 21 nt, synthetic construct
  misc_feature 1..21: note = HBV-targeting guide sequence portion
  source 1..21: mol_type = other RNA
ttttatcatcttcctcttcat

SEQ ID NO: 12598 - RNA, 21 nt, synthetic construct
  misc_feature 1..21: note = HBV-targeting guide sequence portion
  source 1..21: mol_type = other RNA
ttttatcctaaattcaccaaa

SEQ ID NO: 12599 - RNA, 21 nt, synthetic construct
  misc_feature 1..21: note = HBV-targeting guide sequence portion
  source 1..21: mol_type = other RNA
ttttcacctctgcctaatcat

SEQ ID NO: 12600 - RNA, 21 nt, synthetic construct
  misc_feature 1..21: note = HBV-targeting guide sequence portion
  source 1..21: mol_type = other RNA
ttttccaatgagggttaaaga

SEQ ID NO: 12601 - RNA, 21 nt, synthetic construct
  misc_feature 1..21: note = HBV-targeting guide sequence portion
  source 1..21: mol_type = other RNA
ttttccgaaagcccaggatga

SEQ ID NO: 12602 - RNA, 21 nt, synthetic construct
  misc_feature 1..21: note = HBV-targeting guide sequence portion
  source 1..21: mol_type = other RNA
ttttcctaatatacatctaca

SEQ ID NO: 12603 - RNA, 21 nt, synthetic construct
  misc_feature 1..21: note = HBV-targeting guide sequence portion
  source 1..21: mol_type = other RNA
ttttccttgttgacaagaatc

SEQ ID NO: 12604 - RNA, 21 nt, synthetic construct
  misc_feature 1..21: note = HBV-targeting guide sequence portion
  source 1..21: mol_type = other RNA
ttttcgccaacttacaaggcc

SEQ ID NO: 12605 - RNA, 21 nt, synthetic construct
  misc_feature 1..21: note = HBV-targeting guide sequence portion
  source 1..21: mol_type = other RNA
ttttctagggggaactaccgt

SEQ ID NO: 12606 - RNA, 21 nt, synthetic construct
  misc_feature 1..21: note = HBV-targeting guide sequence portion
  source 1..21: mol_type = other RNA
ttttctcattaactgtaagcg

SEQ ID NO: 12607 - RNA, 21 nt, synthetic construct
  misc_feature 1..21: note = HBV-targeting guide sequence portion
  source 1..21: mol_type = other RNA
ttttctgaaacattctttgat

SEQ ID NO: 12608 - RNA, 21 nt, synthetic construct
  misc_feature 1..21: note = HBV-targeting guide sequence portion
  source 1..21: mol_type = other RNA
ttttcttttgtctttgggtgt

SEQ ID NO: 12609 - RNA, 21 nt, synthetic construct
  misc_feature 1..21: note = HBV-targeting guide sequence portion
  source 1..21: mol_type = other RNA
ttttgataatatcttggtgta

SEQ ID NO: 12610 - RNA, 21 nt, synthetic construct
  misc_feature 1..21: note = HBV-targeting guide sequence portion
  source 1..21: mol_type = other RNA
ttttgccttctgacttctttc

SEQ ID NO: 12611 - RNA, 21 nt, synthetic construct
  misc_feature 1..21: note = HBV-targeting guide sequence portion
  source 1..21: mol_type = other RNA
ttttgctcgcagccggtctgg

SEQ ID NO: 12612 - RNA, 21 nt, synthetic construct
  misc_feature 1..21: note = HBV-targeting guide sequence portion
  source 1..21: mol_type = other RNA
ttttgctgccccttttacaca

SEQ ID NO: 12613 - RNA, 21 nt, synthetic construct
  misc_feature 1..21: note = HBV-targeting guide sequence portion
  source 1..21: mol_type = other RNA
ttttggaagagaaacggtcct

SEQ ID NO: 12614 - RNA, 21 nt, synthetic construct
  misc_feature 1..21: note = HBV-targeting guide sequence portion
  source 1..21: mol_type = other RNA
ttttggagtgtggattcgcac

SEQ ID NO: 12615 - RNA, 21 nt, synthetic construct
  misc_feature 1..21: note = HBV-targeting guide sequence portion
  source 1..21: mol_type = other RNA
ttttggccaagacacacggta

SEQ ID NO: 12616 - RNA, 21 nt, synthetic construct
  misc_feature 1..21: note = HBV-targeting guide sequence portion
  source 1..21: mol_type = other RNA
ttttggggtggagccctcagg

SEQ ID NO: 12617 - RNA, 21 nt, synthetic construct
  misc_feature 1..21: note = HBV-targeting guide sequence portion
  source 1..21: mol_type = other RNA
ttttgtacagcaacaggaggg

SEQ ID NO: 12618 - RNA, 21 nt, synthetic construct
  misc_feature 1..21: note = HBV-targeting guide sequence portion
  source 1..21: mol_type = other RNA
ttttgtctttgggtgtacatt

SEQ ID NO: 12619 - RNA, 21 nt, synthetic construct
  misc_feature 1..21: note = HBV-targeting guide sequence portion
  source 1..21: mol_type = other RNA
ttttgtggcaatgatccccaa

SEQ ID NO: 12620 - RNA, 21 nt, synthetic construct
  misc_feature 1..21: note = HBV-targeting guide sequence portion
  source 1..21: mol_type = other RNA
ttttgtgtatgatgtgatttt

SEQ ID NO: 12621 - RNA, 21 nt, synthetic construct
  misc_feature 1..21: note = HBV-targeting guide sequence portion
  source 1..21: mol_type = other RNA
ttttgttagggtttaaatgta

SEQ ID NO: 12622 - RNA, 21 nt, synthetic construct
  misc_feature 1..21: note = HBV-targeting guide sequence portion
  source 1..21: mol_type = other RNA
tttttcacctctgcctaatca

SEQ ID NO: 12623 - RNA, 21 nt, synthetic construct
  misc_feature 1..21: note = HBV-targeting guide sequence portion
  source 1..21: mol_type = other RNA
tttttcgccaacttacaaggc

SEQ ID NO: 12624 - RNA, 21 nt, synthetic construct
  misc_feature 1..21: note = HBV-targeting guide sequence portion
  source 1..21: mol_type = other RNA
tttttgataatatcttggtgt

SEQ ID NO: 12625 - RNA, 21 nt, synthetic construct
  misc_feature 1..21: note = HBV-targeting guide sequence portion
  source 1..21: mol_type = other RNA
tttttgccttctgacttcttt

SEQ ID NO: 12626 - RNA, 21 nt, synthetic construct
  misc_feature 1..21: note = HBV-targeting guide sequence portion
  source 1..21: mol_type = other RNA
ttttttgataatatcttggtg

SEQ ID NO: 12627 - RNA, 22 nt, synthetic construct
  misc_feature 1..22: note = HBV-targeting guide sequence portion
  source 1..22: mol_type = other RNA
aaaaaatgtgaacagtttgtag

SEQ ID NO: 12628 - RNA, 22 nt, synthetic construct
  misc_feature 1..22: note = HBV-targeting guide sequence portion
  source 1..22: mol_type = other RNA
aaaaacgagagtaactccacag

SEQ ID NO: 12629 - RNA, 22 nt, synthetic construct
  misc_feature 1..22: note = HBV-targeting guide sequence portion
  source 1..22: mol_type = other RNA
aaaaagtgaaagcctgcttaga

SEQ ID NO: 12630 - RNA, 22 nt, synthetic construct
  misc_feature 1..22: note = HBV-targeting guide sequence portion
  source 1..22: mol_type = other RNA
aaaaagttgcatggtgctggtg

SEQ ID NO: 12631 - RNA, 22 nt, synthetic construct
  misc_feature 1..22: note = HBV-targeting guide sequence portion
  source 1..22: mol_type = other RNA
aaaaatgtgaacagtttgtagg

SEQ ID NO: 12632 - RNA, 22 nt, synthetic construct
  misc_feature 1..22: note = HBV-targeting guide sequence portion
  source 1..22: mol_type = other RNA
aaaacaaagagatggggttatt

SEQ ID NO: 12633 - RNA, 22 nt, synthetic construct
  misc_feature 1..22: note = HBV-targeting guide sequence portion
  source 1..22: mol_type = other RNA
aaaacaagcggctaggagttcc

SEQ ID NO: 12634 - RNA, 22 nt, synthetic construct
  misc_feature 1..22: note = HBV-targeting guide sequence portion
  source 1..22: mol_type = other RNA
aaaacacccgccttccatagag

SEQ ID NO: 12635 - RNA, 22 nt, synthetic construct
  misc_feature 1..22: note = HBV-targeting guide sequence portion
  source 1..22: mol_type = other RNA
aaaacaccctcttttcctaata

SEQ ID NO: 12636 - RNA, 22 nt, synthetic construct
  misc_feature 1..22: note = HBV-targeting guide sequence portion
  source 1..22: mol_type = other RNA
aaaacccagaagacccacaatt

SEQ ID NO: 12637 - RNA, 22 nt, synthetic construct
  misc_feature 1..22: note = HBV-targeting guide sequence portion
  source 1..22: mol_type = other RNA
aaaaccccgcctgtaacacgag

SEQ ID NO: 12638 - RNA, 22 nt, synthetic construct
  misc_feature 1..22: note = HBV-targeting guide sequence portion
  source 1..22: mol_type = other RNA
aaaacctagcaggcataatcaa

SEQ ID NO: 12639 - RNA, 22 nt, synthetic construct
  misc_feature 1..22: note = HBV-targeting guide sequence portion
  source 1..22: mol_type = other RNA
aaaaccttcggatggaaactgc

SEQ ID NO: 12640 - RNA, 22 nt, synthetic construct
  misc_feature 1..22: note = HBV-targeting guide sequence portion
  source 1..22: mol_type = other RNA
aaaacgagagtaactccacagt

SEQ ID NO: 12641 - RNA, 22 nt, synthetic construct
  misc_feature 1..22: note = HBV-targeting guide sequence portion
  source 1..22: mol_type = other RNA
aaaacgccgcagacacatccag

SEQ ID NO: 12642 - RNA, 22 nt, synthetic construct
  misc_feature 1..22: note = HBV-targeting guide sequence portion
  source 1..22: mol_type = other RNA
aaaactcccggttaacaggcct

SEQ ID NO: 12643 - RNA, 22 nt, synthetic construct
  misc_feature 1..22: note = HBV-targeting guide sequence portion
  source 1..22: mol_type = other RNA
aaaagaaaattggtaacagcgg

SEQ ID NO: 12644 - RNA, 22 nt, synthetic construct
  misc_feature 1..22: note = HBV-targeting guide sequence portion
  source 1..22: mol_type = other RNA
aaaagacaccaaatactctagg

SEQ ID NO: 12645 - RNA, 22 nt, synthetic construct
  misc_feature 1..22: note = HBV-targeting guide sequence portion
  source 1..22: mol_type = other RNA
aaaagacggttgaaattgatta

SEQ ID NO: 12646 - RNA, 22 nt, synthetic construct
  misc_feature 1..22: note = HBV-targeting guide sequence portion
  source 1..22: mol_type = other RNA
aaaagagggtgttttccaatga

SEQ ID NO: 12647 - RNA, 22 nt, synthetic construct
  misc_feature 1..22: note = HBV-targeting guide sequence portion
  source 1..22: mol_type = other RNA
aaaaggcctccgtgcggtgggg

SEQ ID NO: 12648 - RNA, 22 nt, synthetic construct
  misc_feature 1..22: note = HBV-targeting guide sequence portion
  source 1..22: mol_type = other RNA
aaaaggggcagcaaaacccaga

SEQ ID NO: 12649 - RNA, 22 nt, synthetic construct
  misc_feature 1..22: note = HBV-targeting guide sequence portion
  source 1..22: mol_type = other RNA
aaaagtaagacaagaaatgtga

SEQ ID NO: 12650 - RNA, 22 nt, synthetic construct
  misc_feature 1..22: note = HBV-targeting guide sequence portion
  source 1..22: mol_type = other RNA
aaaagtgaaagcctgcttagat

SEQ ID NO: 12651 - RNA, 22 nt, synthetic construct
  misc_feature 1..22: note = HBV-targeting guide sequence portion
  source 1..22: mol_type = other RNA
aaaagttgcatggtgctggtgc

SEQ ID NO: 12652 - RNA, 22 nt, synthetic construct
  misc_feature 1..22: note = HBV-targeting guide sequence portion
  source 1..22: mol_type = other RNA
aaaatcaaagaatgtttcagaa

SEQ ID NO: 12653 - RNA, 22 nt, synthetic construct
  misc_feature 1..22: note = HBV-targeting guide sequence portion
  source 1..22: mol_type = other RNA
aaaatcacatcatacacaaaat

SEQ ID NO: 12654 - RNA, 22 nt, synthetic construct
  misc_feature 1..22: note = HBV-targeting guide sequence portion
  source 1..22: mol_type = other RNA
aaaatgtgaacagtttgtaggc

SEQ ID NO: 12655 - RNA, 22 nt, synthetic construct
  misc_feature 1..22: note = HBV-targeting guide sequence portion
  source 1..22: mol_type = other RNA
aaaattcctatgggagtgggcc

SEQ ID NO: 12656 - RNA, 22 nt, synthetic construct
  misc_feature 1..22: note = HBV-targeting guide sequence portion
  source 1..22: mol_type = other RNA
aaaattcgcagtccccaacctc

SEQ ID NO: 12657 - RNA, 22 nt, synthetic construct
  misc_feature 1..22: note = HBV-targeting guide sequence portion
  source 1..22: mol_type = other RNA
aaaattgagagaagtccaccac

SEQ ID NO: 12658 - RNA, 22 nt, synthetic construct
  misc_feature 1..22: note = HBV-targeting guide sequence portion
  source 1..22: mol_type = other RNA
aaaattggtaacagcggtataa

SEQ ID NO: 12659 - RNA, 22 nt, synthetic construct
  misc_feature 1..22: note = HBV-targeting guide sequence portion
  source 1..22: mol_type = other RNA
aaaatttcccaccttatgagtc

SEQ ID NO: 12660 - RNA, 22 nt, synthetic construct
  misc_feature 1..22: note = HBV-targeting guide sequence portion
  source 1..22: mol_type = other RNA
aaacaaacagtctttgaagtat

SEQ ID NO: 12661 - RNA, 22 nt, synthetic construct
  misc_feature 1..22: note = HBV-targeting guide sequence portion
  source 1..22: mol_type = other RNA
aaacaaagagatggggttattc

SEQ ID NO: 12662 - RNA, 22 nt, synthetic construct
  misc_feature 1..22: note = HBV-targeting guide sequence portion
  source 1..22: mol_type = other RNA
aaacaaaggacgtcccgcgcag

SEQ ID NO: 12663 - RNA, 22 nt, synthetic construct
  misc_feature 1..22: note = HBV-targeting guide sequence portion
  source 1..22: mol_type = other RNA
aaacaagcggctaggagttccg

SEQ ID NO: 12664 - RNA, 22 nt, synthetic construct
  misc_feature 1..22: note = HBV-targeting guide sequence portion
  source 1..22: mol_type = other RNA
aaacaatacctgaacctttacc

SEQ ID NO: 12665 - RNA, 22 nt, synthetic construct
  misc_feature 1..22: note = HBV-targeting guide sequence portion
  source 1..22: mol_type = other RNA
aaacacccgccttccatagagt

SEQ ID NO: 12666 - RNA, 22 nt, synthetic construct
  misc_feature 1..22: note = HBV-targeting guide sequence portion
  source 1..22: mol_type = other RNA
aaacaccctcttttcctaatat

SEQ ID NO: 12667 - RNA, 22 nt, synthetic construct
  misc_feature 1..22: note = HBV-targeting guide sequence portion
  source 1..22: mol_type = other RNA
aaacactcatcctcaggccatg

SEQ ID NO: 12668 - RNA, 22 nt, synthetic construct
  misc_feature 1..22: note = HBV-targeting guide sequence portion
  source 1..22: mol_type = other RNA
aaacacttggcacagacctggc

SEQ ID NO: 12669 - RNA, 22 nt, synthetic construct
  misc_feature 1..22: note = HBV-targeting guide sequence portion
  source 1..22: mol_type = other RNA
aaacagtctttgaagtatgcct

SEQ ID NO: 12670 - RNA, 22 nt, synthetic construct
  misc_feature 1..22: note = HBV-targeting guide sequence portion
  source 1..22: mol_type = other RNA
aaacagtgggggaaagccctac

SEQ ID NO: 12671 - RNA, 22 nt, synthetic construct
  misc_feature 1..22: note = HBV-targeting guide sequence portion
  source 1..22: mol_type = other RNA
aaacataccttgatagtccaga

SEQ ID NO: 12672 - RNA, 22 nt, synthetic construct
  misc_feature 1..22: note = HBV-targeting guide sequence portion
  source 1..22: mol_type = other RNA
aaacattctcgggactgacaac

SEQ ID NO: 12673 - RNA, 22 nt, synthetic construct
  misc_feature 1..22: note = HBV-targeting guide sequence portion
  source 1..22: mol_type = other RNA
aaacattctttgattttgtgta

SEQ ID NO: 12674 - RNA, 22 nt, synthetic construct
  misc_feature 1..22: note = HBV-targeting guide sequence portion
  source 1..22: mol_type = other RNA
aaaccacaatagttgtctgaac

SEQ ID NO: 12675 - RNA, 22 nt, synthetic construct
  misc_feature 1..22: note = HBV-targeting guide sequence portion
  source 1..22: mol_type = other RNA
aaacccagaagacccacaattc

SEQ ID NO: 12676 - RNA, 22 nt, synthetic construct
  misc_feature 1..22: note = HBV-targeting guide sequence portion
  source 1..22: mol_type = other RNA
aaaccccgcctgtaacacgagc

SEQ ID NO: 12677 - RNA, 22 nt, synthetic construct
  misc_feature 1..22: note = HBV-targeting guide sequence portion
  source 1..22: mol_type = other RNA
aaaccctaacaaaacaaagaga

SEQ ID NO: 12678 - RNA, 22 nt, synthetic construct
  misc_feature 1..22: note = HBV-targeting guide sequence portion
  source 1..22: mol_type = other RNA
aaaccctgttccgactactgcc

SEQ ID NO: 12679 - RNA, 22 nt, synthetic construct
  misc_feature 1..22: note = HBV-targeting guide sequence portion
  source 1..22: mol_type = other RNA
aaacctagcaggcataatcaat

SEQ ID NO: 12680 - RNA, 22 nt, synthetic construct
  misc_feature 1..22: note = HBV-targeting guide sequence portion
  source 1..22: mol_type = other RNA
aaaccttattatccagaacatc

SEQ ID NO: 12681 - RNA, 22 nt, synthetic construct
  misc_feature 1..22: note = HBV-targeting guide sequence portion
  source 1..22: mol_type = other RNA
aaaccttcggatggaaactgca

SEQ ID NO: 12682 - RNA, 22 nt, synthetic construct
  misc_feature 1..22: note = HBV-targeting guide sequence portion
  source 1..22: mol_type = other RNA
aaaccttgccagcaaatccgcc

SEQ ID NO: 12683 - RNA, 22 nt, synthetic construct
  misc_feature 1..22: note = HBV-targeting guide sequence portion
  source 1..22: mol_type = other RNA
aaacgagagtaactccacagta

SEQ ID NO: 12684 - RNA, 22 nt, synthetic construct
  misc_feature 1..22: note = HBV-targeting guide sequence portion
  source 1..22: mol_type = other RNA
aaacgccgcagacacatccagc

SEQ ID NO: 12685 - RNA, 22 nt, synthetic construct
  misc_feature 1..22: note = HBV-targeting guide sequence portion
  source 1..22: mol_type = other RNA
aaacgggctgaggcccactccc

SEQ ID NO: 12686 - RNA, 22 nt, synthetic construct
  misc_feature 1..22: note = HBV-targeting guide sequence portion
  source 1..22: mol_type = other RNA
aaacggtcctagagtatttggt

SEQ ID NO: 12687 - RNA, 22 nt, synthetic construct
  misc_feature 1..22: note = HBV-targeting guide sequence portion
  source 1..22: mol_type = other RNA
aaactagacactatttacacac

SEQ ID NO: 12688 - RNA, 22 nt, synthetic construct
  misc_feature 1..22: note = HBV-targeting guide sequence portion
  source 1..22: mol_type = other RNA
aaactccaacaatccagattgg

SEQ ID NO: 12689 - RNA, 22 nt, synthetic construct
  misc_feature 1..22: note = HBV-targeting guide sequence portion
  source 1..22: mol_type = other RNA
aaactcccggttaacaggccta

SEQ ID NO: 12690 - RNA, 22 nt, synthetic construct
  misc_feature 1..22: note = HBV-targeting guide sequence portion
  source 1..22: mol_type = other RNA
aaactctgcaagatcccagagt

SEQ ID NO: 12691 - RNA, 22 nt, synthetic construct
  misc_feature 1..22: note = HBV-targeting guide sequence portion
  source 1..22: mol_type = other RNA
aaactgagccaagagaaacggg

SEQ ID NO: 12692 - RNA, 22 nt, synthetic construct
  misc_feature 1..22: note = HBV-targeting guide sequence portion
  source 1..22: mol_type = other RNA
aaactgcacctgtattcccatc

SEQ ID NO: 12693 - RNA, 22 nt, synthetic construct
  misc_feature 1..22: note = HBV-targeting guide sequence portion
  source 1..22: mol_type = other RNA
aaactgttcacattttttgata

SEQ ID NO: 12694 - RNA, 22 nt, synthetic construct
  misc_feature 1..22: note = HBV-targeting guide sequence portion
  source 1..22: mol_type = other RNA
aaagaaaattggtaacagcggt

SEQ ID NO: 12695 - RNA, 22 nt, synthetic construct
  misc_feature 1..22: note = HBV-targeting guide sequence portion
  source 1..22: mol_type = other RNA
aaagaagtcagaaggcaaaaac

SEQ ID NO: 12696 - RNA, 22 nt, synthetic construct
  misc_feature 1..22: note = HBV-targeting guide sequence portion
  source 1..22: mol_type = other RNA
aaagaatcccagaggattgctg

SEQ ID NO: 12697 - RNA, 22 nt, synthetic construct
  misc_feature 1..22: note = HBV-targeting guide sequence portion
  source 1..22: mol_type = other RNA
aaagaatgtttcagaaaactcc

SEQ ID NO: 12698 - RNA, 22 nt, synthetic construct
  misc_feature 1..22: note = HBV-targeting guide sequence portion
  source 1..22: mol_type = other RNA
aaagaattgcttgcctgagtgc

SEQ ID NO: 12699 - RNA, 22 nt, synthetic construct
  misc_feature 1..22: note = HBV-targeting guide sequence portion
  source 1..22: mol_type = other RNA
aaagaatttggagctactgtgg

SEQ ID NO: 12700 - RNA, 22 nt, synthetic construct
  misc_feature 1..22: note = HBV-targeting guide sequence portion
  source 1..22: mol_type = other RNA
aaagacaaaagaaaattggtaa

SEQ ID NO: 12701 - RNA, 22 nt, synthetic construct
  misc_feature 1..22: note = HBV-targeting guide sequence portion
  source 1..22: mol_type = other RNA
aaagacaccaaatactctagga

SEQ ID NO: 12702 - RNA, 22 nt, synthetic construct
  misc_feature 1..22: note = HBV-targeting guide sequence portion
  source 1..22: mol_type = other RNA
aaagacaggtacagtagaagaa

SEQ ID NO: 12703 - RNA, 22 nt, synthetic construct
  misc_feature 1..22: note = HBV-targeting guide sequence portion
  source 1..22: mol_type = other RNA
aaagacggttgaaattgattat

SEQ ID NO: 12704 - RNA, 22 nt, synthetic construct
  misc_feature 1..22: note = HBV-targeting guide sequence portion
  source 1..22: mol_type = other RNA
aaagactgggaggagttggggg

SEQ ID NO: 12705 - RNA, 22 nt, synthetic construct
  misc_feature 1..22: note = HBV-targeting guide sequence portion
  source 1..22: mol_type = other RNA
aaagactgtttgtttaaagact

SEQ ID NO: 12706 - RNA, 22 nt, synthetic construct
  misc_feature 1..22: note = HBV-targeting guide sequence portion
  source 1..22: mol_type = other RNA
aaagagaggtgcgccccgtggt

SEQ ID NO: 12707 - RNA, 22 nt, synthetic construct
  misc_feature 1..22: note = HBV-targeting guide sequence portion
  source 1..22: mol_type = other RNA
aaagagatggggttattctctt

SEQ ID NO: 12708 - RNA, 22 nt, synthetic construct
  misc_feature 1..22: note = HBV-targeting guide sequence portion
  source 1..22: mol_type = other RNA
aaagagggtgttttccaatgag

SEQ ID NO: 12709 - RNA, 22 nt, synthetic construct
  misc_feature 1..22: note = HBV-targeting guide sequence portion
  source 1..22: mol_type = other RNA
aaagatcattaatctaatctcc

SEQ ID NO: 12710 - RNA, 22 nt, synthetic construct
  misc_feature 1..22: note = HBV-targeting guide sequence portion
  source 1..22: mol_type = other RNA
aaagattctgccccatgctgta

SEQ ID NO: 12711 - RNA, 22 nt, synthetic construct
  misc_feature 1..22: note = HBV-targeting guide sequence portion
  source 1..22: mol_type = other RNA
aaagcaggataaccacattgtg

SEQ ID NO: 12712 - RNA, 22 nt, synthetic construct
  misc_feature 1..22: note = HBV-targeting guide sequence portion
  source 1..22: mol_type = other RNA
aaagccaaacagtgggggaaag

SEQ ID NO: 12713 - RNA, 22 nt, synthetic construct
  misc_feature 1..22: note = HBV-targeting guide sequence portion
  source 1..22: mol_type = other RNA
aaagccacccaaggcacagctt

SEQ ID NO: 12714 - RNA, 22 nt, synthetic construct
  misc_feature 1..22: note = HBV-targeting guide sequence portion
  source 1..22: mol_type = other RNA
aaagcccaggatgatgggatgg

SEQ ID NO: 12715 - RNA, 22 nt, synthetic construct
  misc_feature 1..22: note = HBV-targeting guide sequence portion
  source 1..22: mol_type = other RNA
aaagccccgtaaaatttcccac

SEQ ID NO: 12716 - RNA, 22 nt, synthetic construct
  misc_feature 1..22: note = HBV-targeting guide sequence portion
  source 1..22: mol_type = other RNA
aaagccctacgaaccactgaac

SEQ ID NO: 12717 - RNA, 22 nt, synthetic construct
  misc_feature 1..22: note = HBV-targeting guide sequence portion
  source 1..22: mol_type = other RNA
aaagcctgcttagattgaatac

SEQ ID NO: 12718 - RNA, 22 nt, synthetic construct
  misc_feature 1..22: note = HBV-targeting guide sequence portion
  source 1..22: mol_type = other RNA
aaaggacgtcccgcgcaggatc

SEQ ID NO: 12719 - RNA, 22 nt, synthetic construct
  misc_feature 1..22: note = HBV-targeting guide sequence portion
  source 1..22: mol_type = other RNA
aaaggcctccgtgcggtggggt

SEQ ID NO: 12720 - RNA, 22 nt, synthetic construct
  misc_feature 1..22: note = HBV-targeting guide sequence portion
  source 1..22: mol_type = other RNA
aaaggccttgtaagttggcgaa

SEQ ID NO: 12721 - RNA, 22 nt, synthetic construct
  misc_feature 1..22: note = HBV-targeting guide sequence portion
  source 1..22: mol_type = other RNA
aaagggactcaagatgctgtac

SEQ ID NO: 12722 - RNA, 22 nt, synthetic construct
  misc_feature 1..22: note = HBV-targeting guide sequence portion
  source 1..22: mol_type = other RNA
aaaggggcagcaaaacccagaa

SEQ ID NO: 12723 - RNA, 22 nt, synthetic construct
  misc_feature 1..22: note = HBV-targeting guide sequence portion
  source 1..22: mol_type = other RNA
aaaggttcaggtattgtttaca

SEQ ID NO: 12724 - RNA, 22 nt, synthetic construct
  misc_feature 1..22: note = HBV-targeting guide sequence portion
  source 1..22: mol_type = other RNA
aaaggttccacgcatgcgctga

SEQ ID NO: 12725 - RNA, 22 nt, synthetic construct
  misc_feature 1..22: note = HBV-targeting guide sequence portion
  source 1..22: mol_type = other RNA
aaagtaagacaagaaatgtgaa

SEQ ID NO: 12726 - RNA, 22 nt, synthetic construct
  misc_feature 1..22: note = HBV-targeting guide sequence portion
  source 1..22: mol_type = other RNA
aaagtgaaagcctgcttagatt

SEQ ID NO: 12727 - RNA, 22 nt, synthetic construct
  misc_feature 1..22: note = HBV-targeting guide sequence portion
  source 1..22: mol_type = other RNA
aaagtgtgtcaacgaattgtgg

SEQ ID NO: 12728 - RNA, 22 nt, synthetic construct
  misc_feature 1..22: note = HBV-targeting guide sequence portion
  source 1..22: mol_type = other RNA
aaagttcagacaactattgtgg

SEQ ID NO: 12729 - RNA, 22 nt, synthetic construct
  misc_feature 1..22: note = HBV-targeting guide sequence portion
  source 1..22: mol_type = other RNA
aaagttgcatggtgctggtgcg

SEQ ID NO: 12730 - RNA, 22 nt, synthetic construct
  misc_feature 1..22: note = HBV-targeting guide sequence portion
  source 1..22: mol_type = other RNA
aaatactctaggaccgtttctc

SEQ ID NO: 12731 - RNA, 22 nt, synthetic construct
  misc_feature 1..22: note = HBV-targeting guide sequence portion
  source 1..22: mol_type = other RNA
aaatacttgcccttggataagg

SEQ ID NO: 12732 - RNA, 22 nt, synthetic construct
  misc_feature 1..22: note = HBV-targeting guide sequence portion
  source 1..22: mol_type = other RNA
aaatagtgtctagtttggaagt

SEQ ID NO: 12733 - RNA, 22 nt, synthetic construct
  misc_feature 1..22: note = HBV-targeting guide sequence portion
  source 1..22: mol_type = other RNA
aaatatacatcgttcccatggc

SEQ ID NO: 12734 - RNA, 22 nt, synthetic construct
  misc_feature 1..22: note = HBV-targeting guide sequence portion
  source 1..22: mol_type = other RNA
aaatcaaagaatgtttcagaaa

SEQ ID NO: 12735 - RNA, 22 nt, synthetic construct
  misc_feature 1..22: note = HBV-targeting guide sequence portion
  source 1..22: mol_type = other RNA
aaatcacatcatacacaaaatc

SEQ ID NO: 12736 - RNA, 22 nt, synthetic construct
  misc_feature 1..22: note = HBV-targeting guide sequence portion
  source 1..22: mol_type = other RNA
aaatccgcctcctgcctctacc

SEQ ID NO: 12737 - RNA, 22 nt, synthetic construct
  misc_feature 1..22: note = HBV-targeting guide sequence portion
  source 1..22: mol_type = other RNA
aaatgcccctatcctatcaaca

SEQ ID NO: 12738 - RNA, 22 nt, synthetic construct
  misc_feature 1..22: note = HBV-targeting guide sequence portion
  source 1..22: mol_type = other RNA
aaatggcactagtaaactgagc

SEQ ID NO: 12739 - RNA, 22 nt, synthetic construct
  misc_feature 1..22: note = HBV-targeting guide sequence portion
  source 1..22: mol_type = other RNA
aaatgtacacccaaagacaaaa

SEQ ID NO: 12740 - RNA, 22 nt, synthetic construct
  misc_feature 1..22: note = HBV-targeting guide sequence portion
  source 1..22: mol_type = other RNA
aaatgtgaaaccacaatagttg

SEQ ID NO: 12741 - RNA, 22 nt, synthetic construct
  misc_feature 1..22: note = HBV-targeting guide sequence portion
  source 1..22: mol_type = other RNA
aaatgtgaacagtttgtaggcc

SEQ ID NO: 12742 - RNA, 22 nt, synthetic construct
  misc_feature 1..22: note = HBV-targeting guide sequence portion
  source 1..22: mol_type = other RNA
aaattaagagaataaccccatc

SEQ ID NO: 12743 - RNA, 22 nt, synthetic construct
  misc_feature 1..22: note = HBV-targeting guide sequence portion
  source 1..22: mol_type = other RNA
aaattagtacccacccaggtag

SEQ ID NO: 12744 - RNA, 22 nt, synthetic construct
  misc_feature 1..22: note = HBV-targeting guide sequence portion
  source 1..22: mol_type = other RNA
aaattcaccaaatacttgccct

SEQ ID NO: 12745 - RNA, 22 nt, synthetic construct
  misc_feature 1..22: note = HBV-targeting guide sequence portion
  source 1..22: mol_type = other RNA
aaattcctatgggagtgggcct

SEQ ID NO: 12746 - RNA, 22 nt, synthetic construct
  misc_feature 1..22: note = HBV-targeting guide sequence portion
  source 1..22: mol_type = other RNA
aaattcgcagtccccaacctcc

SEQ ID NO: 12747 - RNA, 22 nt, synthetic construct
  misc_feature 1..22: note = HBV-targeting guide sequence portion
  source 1..22: mol_type = other RNA
aaattctttatatgggtcaatg

SEQ ID NO: 12748 - RNA, 22 nt, synthetic construct
  misc_feature 1..22: note = HBV-targeting guide sequence portion
  source 1..22: mol_type = other RNA
aaattgagagaagtccaccacg

SEQ ID NO: 12749 - RNA, 22 nt, synthetic construct
  misc_feature 1..22: note = HBV-targeting guide sequence portion
  source 1..22: mol_type = other RNA
aaattgattatgcctgctaggt

SEQ ID NO: 12750 - RNA, 22 nt, synthetic construct
  misc_feature 1..22: note = HBV-targeting guide sequence portion
  source 1..22: mol_type = other RNA
aaattggtaacagcggtataaa

SEQ ID NO: 12751 - RNA, 22 nt, synthetic construct
  misc_feature 1..22: note = HBV-targeting guide sequence portion
  source 1..22: mol_type = other RNA
aaattggtctgcgcaccagcac

SEQ ID NO: 12752 - RNA, 22 nt, synthetic construct
  misc_feature 1..22: note = HBV-targeting guide sequence portion
  source 1..22: mol_type = other RNA
aaatttcccaccttatgagtcc

SEQ ID NO: 12753 - RNA, 22 nt, synthetic construct
  misc_feature 1..22: note = HBV-targeting guide sequence portion
  source 1..22: mol_type = other RNA
aaattttacggggctttattct

SEQ ID NO: 12754 - RNA, 22 nt, synthetic construct
  misc_feature 1..22: note = HBV-targeting guide sequence portion
  source 1..22: mol_type = other RNA
aacaaaacaaagagatggggtt

SEQ ID NO: 12755 - RNA, 22 nt, synthetic construct
  misc_feature 1..22: note = HBV-targeting guide sequence portion
  source 1..22: mol_type = other RNA
aacaaacagtctttgaagtatg

SEQ ID NO: 12756 - RNA, 22 nt, synthetic construct
  misc_feature 1..22: note = HBV-targeting guide sequence portion
  source 1..22: mol_type = other RNA
aacaaagagatggggttattct

SEQ ID NO: 12757 - RNA, 22 nt, synthetic construct
  misc_feature 1..22: note = HBV-targeting guide sequence portion
  source 1..22: mol_type = other RNA
aacaaaggacgtcccgcgcagg

SEQ ID NO: 12758 - RNA, 22 nt, synthetic construct
  misc_feature 1..22: note = HBV-targeting guide sequence portion
  source 1..22: mol_type = other RNA
aacaaatggcactagtaaactg

SEQ ID NO: 12759 - RNA, 22 nt, synthetic construct
  misc_feature 1..22: note = HBV-targeting guide sequence portion
  source 1..22: mol_type = other RNA
aacaacacaagtctccggaagt

SEQ ID NO: 12760 - RNA, 22 nt, synthetic construct
  misc_feature 1..22: note = HBV-targeting guide sequence portion
  source 1..22: mol_type = other RNA
aacaagaagatgaggcatagca

SEQ ID NO: 12761 - RNA, 22 nt, synthetic construct
  misc_feature 1..22: note = HBV-targeting guide sequence portion
  source 1..22: mol_type = other RNA
aacaagagatgattaggcagag

SEQ ID NO: 12762 - RNA, 22 nt, synthetic construct
  misc_feature 1..22: note = HBV-targeting guide sequence portion
  source 1..22: mol_type = other RNA
aacaagagctacagcatggggc

SEQ ID NO: 12763 - RNA, 22 nt, synthetic construct
  misc_feature 1..22: note = HBV-targeting guide sequence portion
  source 1..22: mol_type = other RNA
aacaagcggctaggagttccgc

SEQ ID NO: 12764 - RNA, 22 nt, synthetic construct
  misc_feature 1..22: note = HBV-targeting guide sequence portion
  source 1..22: mol_type = other RNA
aacaaggaaaaccccgcctgta

SEQ ID NO: 12765 - RNA, 22 nt, synthetic construct
  misc_feature 1..22: note = HBV-targeting guide sequence portion
  source 1..22: mol_type = other RNA
aacaaggatccctggccagacg

SEQ ID NO: 12766 - RNA, 22 nt, synthetic construct
  misc_feature 1..22: note = HBV-targeting guide sequence portion
  source 1..22: mol_type = other RNA
aacaaggtaggagctggagcat

SEQ ID NO: 12767 - RNA, 22 nt, synthetic construct
  misc_feature 1..22: note = HBV-targeting guide sequence portion
  source 1..22: mol_type = other RNA
aacaatacctgaacctttaccc

SEQ ID NO: 12768 - RNA, 22 nt, synthetic construct
  misc_feature 1..22: note = HBV-targeting guide sequence portion
  source 1..22: mol_type = other RNA
aacaatcaatgacatagcccat

SEQ ID NO: 12769 - RNA, 22 nt, synthetic construct
  misc_feature 1..22: note = HBV-targeting guide sequence portion
  source 1..22: mol_type = other RNA
aacaatccagattgggacttca

SEQ ID NO: 12770 - RNA, 22 nt, synthetic construct
  misc_feature 1..22: note = HBV-targeting guide sequence portion
  source 1..22: mol_type = other RNA
aacaatgctcaggagactccaa

SEQ ID NO: 12771 - RNA, 22 nt, synthetic construct
  misc_feature 1..22: note = HBV-targeting guide sequence portion
  source 1..22: mol_type = other RNA
aacacaagtctccggaagtgtt

SEQ ID NO: 12772 - RNA, 22 nt, synthetic construct
  misc_feature 1..22: note = HBV-targeting guide sequence portion
  source 1..22: mol_type = other RNA
aacacatagcgcctcattctgt

SEQ ID NO: 12773 - RNA, 22 nt, synthetic construct
  misc_feature 1..22: note = HBV-targeting guide sequence portion
  source 1..22: mol_type = other RNA
aacacccgccttccatagagtg

SEQ ID NO: 12774 - RNA, 22 nt, synthetic construct
  misc_feature 1..22: note = HBV-targeting guide sequence portion
  source 1..22: mol_type = other RNA
aacaccctcttttcctaatata

SEQ ID NO: 12775 - RNA, 22 nt, synthetic construct
  misc_feature 1..22: note = HBV-targeting guide sequence portion
  source 1..22: mol_type = other RNA
aacacgagcaggggtcctagga

SEQ ID NO: 12776 - RNA, 22 nt, synthetic construct
  misc_feature 1..22: note = HBV-targeting guide sequence portion
  source 1..22: mol_type = other RNA
aacactcatatgggcctaaagt

SEQ ID NO: 12777 - RNA, 22 nt, synthetic construct
  misc_feature 1..22: note = HBV-targeting guide sequence portion
  source 1..22: mol_type = other RNA
aacacttccggagacttgtgtt

SEQ ID NO: 12778 - RNA, 22 nt, synthetic construct
  misc_feature 1..22: note = HBV-targeting guide sequence portion
  source 1..22: mol_type = other RNA
aacacttggcacagacctggcc

SEQ ID NO: 12779 - RNA, 22 nt, synthetic construct
  misc_feature 1..22: note = HBV-targeting guide sequence portion
  source 1..22: mol_type = other RNA
aacagagttgtcagtcccgaga

SEQ ID NO: 12780 - RNA, 22 nt, synthetic construct
  misc_feature 1..22: note = HBV-targeting guide sequence portion
  source 1..22: mol_type = other RNA
aacagcggtataaagggactca

SEQ ID NO: 12781 - RNA, 22 nt, synthetic construct
  misc_feature 1..22: note = HBV-targeting guide sequence portion
  source 1..22: mol_type = other RNA
aacaggagggatacatagaggt

SEQ ID NO: 12782 - RNA, 22 nt, synthetic construct
  misc_feature 1..22: note = HBV-targeting guide sequence portion
  source 1..22: mol_type = other RNA
aacaggcctattgattggaaag

SEQ ID NO: 12783 - RNA, 22 nt, synthetic construct
  misc_feature 1..22: note = HBV-targeting guide sequence portion
  source 1..22: mol_type = other RNA
aacagggtttactgttcctgaa

SEQ ID NO: 12784 - RNA, 22 nt, synthetic construct
  misc_feature 1..22: note = HBV-targeting guide sequence portion
  source 1..22: mol_type = other RNA
aacagtaaaccctgttccgact

SEQ ID NO: 12785 - RNA, 22 nt, synthetic construct
  misc_feature 1..22: note = HBV-targeting guide sequence portion
  source 1..22: mol_type = other RNA
aacagtaggacatgaacaagag

SEQ ID NO: 12786 - RNA, 22 nt, synthetic construct
  misc_feature 1..22: note = HBV-targeting guide sequence portion
  source 1..22: mol_type = other RNA
aacagtctttgaagtatgcctc

SEQ ID NO: 12787 - RNA, 22 nt, synthetic construct
  misc_feature 1..22: note = HBV-targeting guide sequence portion
  source 1..22: mol_type = other RNA
aacagtgggggaaagccctacg

SEQ ID NO: 12788 - RNA, 22 nt, synthetic construct
  misc_feature 1..22: note = HBV-targeting guide sequence portion
  source 1..22: mol_type = other RNA
aacagtttgtaggcccgcttac

SEQ ID NO: 12789 - RNA, 22 nt, synthetic construct
  misc_feature 1..22: note = HBV-targeting guide sequence portion
  source 1..22: mol_type = other RNA
aacataccttgatagtccagaa

SEQ ID NO: 12790 - RNA, 22 nt, synthetic construct
  misc_feature 1..22: note = HBV-targeting guide sequence portion
  source 1..22: mol_type = other RNA
aacatcacatcaggattcctag

SEQ ID NO: 12791 - RNA, 22 nt, synthetic construct
  misc_feature 1..22: note = HBV-targeting guide sequence portion
  source 1..22: mol_type = other RNA
aacatctagttaatcattactt

SEQ ID NO: 12792 - RNA, 22 nt, synthetic construct
  misc_feature 1..22: note = HBV-targeting guide sequence portion
  source 1..22: mol_type = other RNA
aacatggagaacatcacatcag

SEQ ID NO: 12793 - RNA, 22 nt, synthetic construct
  misc_feature 1..22: note = HBV-targeting guide sequence portion
  source 1..22: mol_type = other RNA
aacattctcgggactgacaact

SEQ ID NO: 12794 - RNA, 22 nt, synthetic construct
  misc_feature 1..22: note = HBV-targeting guide sequence portion
  source 1..22: mol_type = other RNA
aacattctttgattttgtgtat

SEQ ID NO: 12795 - RNA, 22 nt, synthetic construct
  misc_feature 1..22: note = HBV-targeting guide sequence portion
  source 1..22: mol_type = other RNA
aacattgagatccccgagattg

SEQ ID NO: 12796 - RNA, 22 nt, synthetic construct
  misc_feature 1..22: note = HBV-targeting guide sequence portion
  source 1..22: mol_type = other RNA
aaccaacaagaagatgaggcat

SEQ ID NO: 12797 - RNA, 22 nt, synthetic construct
  misc_feature 1..22: note = HBV-targeting guide sequence portion
  source 1..22: mol_type = other RNA
aaccacaatagttgtctgaact

SEQ ID NO: 12798 - RNA, 22 nt, synthetic construct
  misc_feature 1..22: note = HBV-targeting guide sequence portion
  source 1..22: mol_type = other RNA
aaccacattgtgtaaaaggggc

SEQ ID NO: 12799 - RNA, 22 nt, synthetic construct
  misc_feature 1..22: note = HBV-targeting guide sequence portion
  source 1..22: mol_type = other RNA
aaccaccagcacgggaccctgc

SEQ ID NO: 12800 - RNA, 22 nt, synthetic construct
  misc_feature 1..22: note = HBV-targeting guide sequence portion
  source 1..22: mol_type = other RNA
aaccactgaacaaatggcacta

SEQ ID NO: 12801 - RNA, 22 nt, synthetic construct
  misc_feature 1..22: note = HBV-targeting guide sequence portion
  source 1..22: mol_type = other RNA
aaccaggacaagttggaggaca

SEQ ID NO: 12802 - RNA, 22 nt, synthetic construct
  misc_feature 1..22: note = HBV-targeting guide sequence portion
  source 1..22: mol_type = other RNA
aaccagtgggggttgcatcagc

SEQ ID NO: 12803 - RNA, 22 nt, synthetic construct
  misc_feature 1..22: note = HBV-targeting guide sequence portion
  source 1..22: mol_type = other RNA
aacccagaagacccacaattcg

SEQ ID NO: 12804 - RNA, 22 nt, synthetic construct
  misc_feature 1..22: note = HBV-targeting guide sequence portion
  source 1..22: mol_type = other RNA
aaccccatctctttgttttgtt

SEQ ID NO: 12805 - RNA, 22 nt, synthetic construct
  misc_feature 1..22: note = HBV-targeting guide sequence portion
  source 1..22: mol_type = other RNA
aacccccactggttggggcttg

SEQ ID NO: 12806 - RNA, 22 nt, synthetic construct
  misc_feature 1..22: note = HBV-targeting guide sequence portion
  source 1..22: mol_type = other RNA
aaccccgcctgtaacacgagca

SEQ ID NO: 12807 - RNA, 22 nt, synthetic construct
  misc_feature 1..22: note = HBV-targeting guide sequence portion
  source 1..22: mol_type = other RNA
aaccctaacaaaacaaagagat

SEQ ID NO: 12808 - RNA, 22 nt, synthetic construct
  misc_feature 1..22: note = HBV-targeting guide sequence portion
  source 1..22: mol_type = other RNA
aaccctagcccgaatgctccag

SEQ ID NO: 12809 - RNA, 22 nt, synthetic construct
  misc_feature 1..22: note = HBV-targeting guide sequence portion
  source 1..22: mol_type = other RNA
aaccctcattggaaaacaccct

SEQ ID NO: 12810 - RNA, 22 nt, synthetic construct
  misc_feature 1..22: note = HBV-targeting guide sequence portion
  source 1..22: mol_type = other RNA
aaccctgttccgactactgcct

SEQ ID NO: 12811 - RNA, 22 nt, synthetic construct
  misc_feature 1..22: note = HBV-targeting guide sequence portion
  source 1..22: mol_type = other RNA
aaccgggagttttctgaaacat

SEQ ID NO: 12812 - RNA, 22 nt, synthetic construct
  misc_feature 1..22: note = HBV-targeting guide sequence portion
  source 1..22: mol_type = other RNA
aaccgtcttttctcattaactg

SEQ ID NO: 12813 - RNA, 22 nt, synthetic construct
  misc_feature 1..22: note = HBV-targeting guide sequence portion
  source 1..22: mol_type = other RNA
aacctagcaggcataatcaatt

SEQ ID NO: 12814 - RNA, 22 nt, synthetic construct
  misc_feature 1..22: note = HBV-targeting guide sequence portion
  source 1..22: mol_type = other RNA
aacctccaatcactcaccaacc

SEQ ID NO: 12815 - RNA, 22 nt, synthetic construct
  misc_feature 1..22: note = HBV-targeting guide sequence portion
  source 1..22: mol_type = other RNA
aacctcctgtcctccaacttgt

SEQ ID NO: 12816 - RNA, 22 nt, synthetic construct
  misc_feature 1..22: note = HBV-targeting guide sequence portion
  source 1..22: mol_type = other RNA
aacctctatgtatccctcctgt

SEQ ID NO: 12817 - RNA, 22 nt, synthetic construct
  misc_feature 1..22: note = HBV-targeting guide sequence portion
  source 1..22: mol_type = other RNA
aacctgcacgactcctgctcaa

SEQ ID NO: 12818 - RNA, 22 nt, synthetic construct
  misc_feature 1..22: note = HBV-targeting guide sequence portion
  source 1..22: mol_type = other RNA
aaccttattatccagaacatct

SEQ ID NO: 12819 - RNA, 22 nt, synthetic construct
  misc_feature 1..22: note = HBV-targeting guide sequence portion
  source 1..22: mol_type = other RNA
aaccttccaccaaactctgcaa

SEQ ID NO: 12820 - RNA, 22 nt, synthetic construct
  misc_feature 1..22: note = HBV-targeting guide sequence portion
  source 1..22: mol_type = other RNA
aaccttcggatggaaactgcac

SEQ ID NO: 12821 - RNA, 22 nt, synthetic construct
  misc_feature 1..22: note = HBV-targeting guide sequence portion
  source 1..22: mol_type = other RNA
aaccttgccagcaaatccgcct

SEQ ID NO: 12822 - RNA, 22 nt, synthetic construct
  misc_feature 1..22: note = HBV-targeting guide sequence portion
  source 1..22: mol_type = other RNA
aacctttaccccgttgccaggc

SEQ ID NO: 12823 - RNA, 22 nt, synthetic construct
  misc_feature 1..22: note = HBV-targeting guide sequence portion
  source 1..22: mol_type = other RNA
aacctttccggctcctctgccg

SEQ ID NO: 12824 - RNA, 22 nt, synthetic construct
  misc_feature 1..22: note = HBV-targeting guide sequence portion
  source 1..22: mol_type = other RNA
aacgaattgtgggtcttctggg

SEQ ID NO: 12825 - RNA, 22 nt, synthetic construct
  misc_feature 1..22: note = HBV-targeting guide sequence portion
  source 1..22: mol_type = other RNA
aacgaccgaccttgaggcatac

SEQ ID NO: 12826 - RNA, 22 nt, synthetic construct
  misc_feature 1..22: note = HBV-targeting guide sequence portion
  source 1..22: mol_type = other RNA
aacgagagtaactccacagtag

SEQ ID NO: 12827 - RNA, 22 nt, synthetic construct
  misc_feature 1..22: note = HBV-targeting guide sequence portion
  source 1..22: mol_type = other RNA
aacgatgtatatttgcgggaga

SEQ ID NO: 12828 - RNA, 22 nt, synthetic construct
  misc_feature 1..22: note = HBV-targeting guide sequence portion
  source 1..22: mol_type = other RNA
aacgcccaccaattcttgccca

SEQ ID NO: 12829 - RNA, 22 nt, synthetic construct
  misc_feature 1..22: note = HBV-targeting guide sequence portion
  source 1..22: mol_type = other RNA
aacgccgcagacacatccagcg

SEQ ID NO: 12830 - RNA, 22 nt, synthetic construct
  misc_feature 1..22: note = HBV-targeting guide sequence portion
  source 1..22: mol_type = other RNA
aacggcaggcagagaagaggac

SEQ ID NO: 12831 - RNA, 22 nt, synthetic construct
  misc_feature 1..22: note = HBV-targeting guide sequence portion
  source 1..22: mol_type = other RNA
aacggccaggtctgtgccaagt

SEQ ID NO: 12832 - RNA, 22 nt, synthetic construct
  misc_feature 1..22: note = HBV-targeting guide sequence portion
  source 1..22: mol_type = other RNA
aacgggctgaggcccactccca

SEQ ID NO: 12833 - RNA, 22 nt, synthetic construct
  misc_feature 1..22: note = HBV-targeting guide sequence portion
  source 1..22: mol_type = other RNA
aacggggtaaaggttcaggtat

SEQ ID NO: 12834 - RNA, 22 nt, synthetic construct
  misc_feature 1..22: note = HBV-targeting guide sequence portion
  source 1..22: mol_type = other RNA
aacggtcctagagtatttggtg

SEQ ID NO: 12835 - RNA, 22 nt, synthetic construct
  misc_feature 1..22: note = HBV-targeting guide sequence portion
  source 1..22: mol_type = other RNA
aactaatgactctagctacctg

SEQ ID NO: 12836 - RNA, 22 nt, synthetic construct
  misc_feature 1..22: note = HBV-targeting guide sequence portion
  source 1..22: mol_type = other RNA
aactaccgtgtgtcttggccaa

SEQ ID NO: 12837 - RNA, 22 nt, synthetic construct
  misc_feature 1..22: note = HBV-targeting guide sequence portion
  source 1..22: mol_type = other RNA
aactagacactatttacacact

SEQ ID NO: 12838 - RNA, 22 nt, synthetic construct
  misc_feature 1..22: note = HBV-targeting guide sequence portion
  source 1..22: mol_type = other RNA
aactagatgttctggataataa

SEQ ID NO: 12839 - RNA, 22 nt, synthetic construct
  misc_feature 1..22: note = HBV-targeting guide sequence portion
  source 1..22: mol_type = other RNA
aactattgtggtttcacatttc

SEQ ID NO: 12840 - RNA, 22 nt, synthetic construct
  misc_feature 1..22: note = HBV-targeting guide sequence portion
  source 1..22: mol_type = other RNA
aactccaacaatccagattggg

SEQ ID NO: 12841 - RNA, 22 nt, synthetic construct
  misc_feature 1..22: note = HBV-targeting guide sequence portion
  source 1..22: mol_type = other RNA
aactccacaaccttccaccaaa

SEQ ID NO: 12842 - RNA, 22 nt, synthetic construct
  misc_feature 1..22: note = HBV-targeting guide sequence portion
  source 1..22: mol_type = other RNA
aactccacagtagctccaaatt

SEQ ID NO: 12843 - RNA, 22 nt, synthetic construct
  misc_feature 1..22: note = HBV-targeting guide sequence portion
  source 1..22: mol_type = other RNA
aactcccggttaacaggcctat

SEQ ID NO: 12844 - RNA, 22 nt, synthetic construct
  misc_feature 1..22: note = HBV-targeting guide sequence portion
  source 1..22: mol_type = other RNA
aactccctcgcctcgcagacga

SEQ ID NO: 12845 - RNA, 22 nt, synthetic construct
  misc_feature 1..22: note = HBV-targeting guide sequence portion
  source 1..22: mol_type = other RNA
aactcctagccgcttgttttgc

SEQ ID NO: 12846 - RNA, 22 nt, synthetic construct
  misc_feature 1..22: note = HBV-targeting guide sequence portion
  source 1..22: mol_type = other RNA
aactcctcccagtctttaaaca

SEQ ID NO: 12847 - RNA, 22 nt, synthetic construct
  misc_feature 1..22: note = HBV-targeting guide sequence portion
  source 1..22: mol_type = other RNA
aactctgcaagatcccagagtg

SEQ ID NO: 12848 - RNA, 22 nt, synthetic construct
  misc_feature 1..22: note = HBV-targeting guide sequence portion
  source 1..22: mol_type = other RNA
aactctgttgtcctctcccgca

SEQ ID NO: 12849 - RNA, 22 nt, synthetic construct
  misc_feature 1..22: note = HBV-targeting guide sequence portion
  source 1..22: mol_type = other RNA
aactgaaagccaaacagtgggg

SEQ ID NO: 12850 - RNA, 22 nt, synthetic construct
  misc_feature 1..22: note = HBV-targeting guide sequence portion
  source 1..22: mol_type = other RNA
aactgactactaggtccctaga

SEQ ID NO: 12851 - RNA, 22 nt, synthetic construct
  misc_feature 1..22: note = HBV-targeting guide sequence portion
  source 1..22: mol_type = other RNA
aactgagccaagagaaacgggc

SEQ ID NO: 12852 - RNA, 22 nt, synthetic construct
  misc_feature 1..22: note = HBV-targeting guide sequence portion
  source 1..22: mol_type = other RNA
aactgcacctgtattcccatcc

SEQ ID NO: 12853 - RNA, 22 nt, synthetic construct
  misc_feature 1..22: note = HBV-targeting guide sequence portion
  source 1..22: mol_type = other RNA
aactggagccaccagcagggag

SEQ ID NO: 12854 - RNA, 22 nt, synthetic construct
  misc_feature 1..22: note = HBV-targeting guide sequence portion
  source 1..22: mol_type = other RNA
aactggatcctgcgcgggacgt

SEQ ID NO: 12855 - RNA, 22 nt, synthetic construct
  misc_feature 1..22: note = HBV-targeting guide sequence portion
  source 1..22: mol_type = other RNA
aactggtggtcgggaaagaatc

SEQ ID NO: 12856 - RNA, 22 nt, synthetic construct
  misc_feature 1..22: note = HBV-targeting guide sequence portion
  source 1..22: mol_type = other RNA
aactgtaagcgggcctacaaac

SEQ ID NO: 12857 - RNA, 22 nt, synthetic construct
  misc_feature 1..22: note = HBV-targeting guide sequence portion
  source 1..22: mol_type = other RNA
aactgttcacattttttgataa

SEQ ID NO: 12858 - RNA, 22 nt, synthetic construct
  misc_feature 1..22: note = HBV-targeting guide sequence portion
  source 1..22: mol_type = other RNA
aacttacaaggcctttctgtgt

SEQ ID NO: 12859 - RNA, 22 nt, synthetic construct
  misc_feature 1..22: note = HBV-targeting guide sequence portion
  source 1..22: mol_type = other RNA
aacttgtcctggttatcgctgg

SEQ ID NO: 12860 - RNA, 22 nt, synthetic construct
  misc_feature 1..22: note = HBV-targeting guide sequence portion
  source 1..22: mol_type = other RNA
aactttaggcccatatgagtgt

SEQ ID NO: 12861 - RNA, 22 nt, synthetic construct
  misc_feature 1..22: note = HBV-targeting guide sequence portion
  source 1..22: mol_type = other RNA
aactttttcacctctgcctaat

SEQ ID NO: 12862 - RNA, 22 nt, synthetic construct
  misc_feature 1..22: note = HBV-targeting guide sequence portion
  source 1..22: mol_type = other RNA
aagaaaattggtaacagcggta

SEQ ID NO: 12863 - RNA, 22 nt, synthetic construct
  misc_feature 1..22: note = HBV-targeting guide sequence portion
  source 1..22: mol_type = other RNA
aagaaatgtgaaaccacaatag

SEQ ID NO: 12864 - RNA, 22 nt, synthetic construct
  misc_feature 1..22: note = HBV-targeting guide sequence portion
  source 1..22: mol_type = other RNA
aagaaccaacaagaagatgagg

SEQ ID NO: 12865 - RNA, 22 nt, synthetic construct
  misc_feature 1..22: note = HBV-targeting guide sequence portion
  source 1..22: mol_type = other RNA
aagaactccctcgcctcgcaga

SEQ ID NO: 12866 - RNA, 22 nt, synthetic construct
  misc_feature 1..22: note = HBV-targeting guide sequence portion
  source 1..22: mol_type = other RNA
aagaagaactccctcgcctcgc

SEQ ID NO: 12867 - RNA, 22 nt, synthetic construct
  misc_feature 1..22: note = HBV-targeting guide sequence portion
  source 1..22: mol_type = other RNA
aagaagatgaggcatagcagca

SEQ ID NO: 12868 - RNA, 22 nt, synthetic construct
  misc_feature 1..22: note = HBV-targeting guide sequence portion
  source 1..22: mol_type = other RNA
aagaagtcagaaggcaaaaacg

SEQ ID NO: 12869 - RNA, 22 nt, synthetic construct
  misc_feature 1..22: note = HBV-targeting guide sequence portion
  source 1..22: mol_type = other RNA
aagaataaagccccgtaaaatt

SEQ ID NO: 12870 - RNA, 22 nt, synthetic construct
  misc_feature 1..22: note = HBV-targeting guide sequence portion
  source 1..22: mol_type = other RNA
aagaatatggtgacccacagaa

SEQ ID NO: 12871 - RNA, 22 nt, synthetic construct
  misc_feature 1..22: note = HBV-targeting guide sequence portion
  source 1..22: mol_type = other RNA
aagaatcccagaggattgctgg

SEQ ID NO: 12872 - RNA, 22 nt, synthetic construct
  misc_feature 1..22: note = HBV-targeting guide sequence portion
  source 1..22: mol_type = other RNA
aagaatcctcacaataccgcag

SEQ ID NO: 12873 - RNA, 22 nt, synthetic construct
  misc_feature 1..22: note = HBV-targeting guide sequence portion
  source 1..22: mol_type = other RNA
aagaatgtttcagaaaactccc

SEQ ID NO: 12874 - RNA, 22 nt, synthetic construct
  misc_feature 1..22: note = HBV-targeting guide sequence portion
  source 1..22: mol_type = other RNA
aagaattgcttgcctgagtgca

SEQ ID NO: 12875 - RNA, 22 nt, synthetic construct
  misc_feature 1..22: note = HBV-targeting guide sequence portion
  source 1..22: mol_type = other RNA
aagaattggtgggcgttcacgg

SEQ ID NO: 12876 - RNA, 22 nt, synthetic construct
  misc_feature 1..22: note = HBV-targeting guide sequence portion
  source 1..22: mol_type = other RNA
aagaatttggagctactgtgga

SEQ ID NO: 12877 - RNA, 22 nt, synthetic construct
  misc_feature 1..22: note = HBV-targeting guide sequence portion
  source 1..22: mol_type = other RNA
aagacaaaagaaaattggtaac

SEQ ID NO: 12878 - RNA, 22 nt, synthetic construct
  misc_feature 1..22: note = HBV-targeting guide sequence portion
  source 1..22: mol_type = other RNA
aagacaagaaatgtgaaaccac

SEQ ID NO: 12879 - RNA, 22 nt, synthetic construct
  misc_feature 1..22: note = HBV-targeting guide sequence portion
  source 1..22: mol_type = other RNA
aagacacacggtagttccccct

SEQ ID NO: 12880 - RNA, 22 nt, synthetic construct
  misc_feature 1..22: note = HBV-targeting guide sequence portion
  source 1..22: mol_type = other RNA
aagacaccaaatactctaggac

SEQ ID NO: 12881 - RNA, 22 nt, synthetic construct
  misc_feature 1..22: note = HBV-targeting guide sequence portion
  source 1..22: mol_type = other RNA
aagacaggtacagtagaagaat

SEQ ID NO: 12882 - RNA, 22 nt, synthetic construct
  misc_feature 1..22: note = HBV-targeting guide sequence portion
  source 1..22: mol_type = other RNA
aagacccacaattcgttgacac

SEQ ID NO: 12883 - RNA, 22 nt, synthetic construct
  misc_feature 1..22: note = HBV-targeting guide sequence portion
  source 1..22: mol_type = other RNA
aagaccttgggcaagaattggt

SEQ ID NO: 12884 - RNA, 22 nt, synthetic construct
  misc_feature 1..22: note = HBV-targeting guide sequence portion
  source 1..22: mol_type = other RNA
aagacggttgaaattgattatg

SEQ ID NO: 12885 - RNA, 22 nt, synthetic construct
  misc_feature 1..22: note = HBV-targeting guide sequence portion
  source 1..22: mol_type = other RNA
aagactgggaggagttggggga

SEQ ID NO: 12886 - RNA, 22 nt, synthetic construct
  misc_feature 1..22: note = HBV-targeting guide sequence portion
  source 1..22: mol_type = other RNA
aagactgtttgtttaaagactg

SEQ ID NO: 12887 - RNA, 22 nt, synthetic construct
  misc_feature 1..22: note = HBV-targeting guide sequence portion
  source 1..22: mol_type = other RNA
aagagaaacgggctgaggccca

SEQ ID NO: 12888 - RNA, 22 nt, synthetic construct
  misc_feature 1..22: note = HBV-targeting guide sequence portion
  source 1..22: mol_type = other RNA
aagagaaacggtcctagagtat

SEQ ID NO: 12889 - RNA, 22 nt, synthetic construct
  misc_feature 1..22: note = HBV-targeting guide sequence portion
  source 1..22: mol_type = other RNA
aagagaataaccccatctcttt

SEQ ID NO: 12890 - RNA, 22 nt, synthetic construct
  misc_feature 1..22: note = HBV-targeting guide sequence portion
  source 1..22: mol_type = other RNA
aagagaggtgcgccccgtggtc

SEQ ID NO: 12891 - RNA, 22 nt, synthetic construct
  misc_feature 1..22: note = HBV-targeting guide sequence portion
  source 1..22: mol_type = other RNA
aagagagtgtcaacacatagcg

SEQ ID NO: 12892 - RNA, 22 nt, synthetic construct
  misc_feature 1..22: note = HBV-targeting guide sequence portion
  source 1..22: mol_type = other RNA
aagagatgattaggcagaggtg

SEQ ID NO: 12893 - RNA, 22 nt, synthetic construct
  misc_feature 1..22: note = HBV-targeting guide sequence portion
  source 1..22: mol_type = other RNA
aagagatggggttattctctta

SEQ ID NO: 12894 - RNA, 22 nt, synthetic construct
  misc_feature 1..22: note = HBV-targeting guide sequence portion
  source 1..22: mol_type = other RNA
aagagctacagcatggggcaga

SEQ ID NO: 12895 - RNA, 22 nt, synthetic construct
  misc_feature 1..22: note = HBV-targeting guide sequence portion
  source 1..22: mol_type = other RNA
aagaggaagatgataaaacgcc

SEQ ID NO: 12896 - RNA, 22 nt, synthetic construct
  misc_feature 1..22: note = HBV-targeting guide sequence portion
  source 1..22: mol_type = other RNA
aagaggacgacagggccccaag

SEQ ID NO: 12897 - RNA, 22 nt, synthetic construct
  misc_feature 1..22: note = HBV-targeting guide sequence portion
  source 1..22: mol_type = other RNA
aagaggactcttggactctctg

SEQ ID NO: 12898 - RNA, 22 nt, synthetic construct
  misc_feature 1..22: note = HBV-targeting guide sequence portion
  source 1..22: mol_type = other RNA
aagagggtgttttccaatgagg

SEQ ID NO: 12899 - RNA, 22 nt, synthetic construct
  misc_feature 1..22: note = HBV-targeting guide sequence portion
  source 1..22: mol_type = other RNA
aagagtcctcttatgtaagacc

SEQ ID NO: 12900 - RNA, 22 nt, synthetic construct
  misc_feature 1..22: note = HBV-targeting guide sequence portion
  source 1..22: mol_type = other RNA
aagatattatcaaaaaatgtga

SEQ ID NO: 12901 - RNA, 22 nt, synthetic construct
  misc_feature 1..22: note = HBV-targeting guide sequence portion
  source 1..22: mol_type = other RNA
aagatcaagcatctagggacct

SEQ ID NO: 12902 - RNA, 22 nt, synthetic construct
  misc_feature 1..22: note = HBV-targeting guide sequence portion
  source 1..22: mol_type = other RNA
aagatcattaatctaatctcct

SEQ ID NO: 12903 - RNA, 22 nt, synthetic construct
  misc_feature 1..22: note = HBV-targeting guide sequence portion
  source 1..22: mol_type = other RNA
aagatcccagagtgagaggcct

SEQ ID NO: 12904 - RNA, 22 nt, synthetic construct
  misc_feature 1..22: note = HBV-targeting guide sequence portion
  source 1..22: mol_type = other RNA
aagatctcaatcgccgcgtcgc

SEQ ID NO: 12905 - RNA, 22 nt, synthetic construct
  misc_feature 1..22: note = HBV-targeting guide sequence portion
  source 1..22: mol_type = other RNA
aagatctcaatctcggggatct

SEQ ID NO: 12906 - RNA, 22 nt, synthetic construct
  misc_feature 1..22: note = HBV-targeting guide sequence portion
  source 1..22: mol_type = other RNA
aagatctcgtacggaaggaaag

SEQ ID NO: 12907 - RNA, 22 nt, synthetic construct
  misc_feature 1..22: note = HBV-targeting guide sequence portion
  source 1..22: mol_type = other RNA
aagatgaggcatagcagcagga

SEQ ID NO: 12908 - RNA, 22 nt, synthetic construct
  misc_feature 1..22: note = HBV-targeting guide sequence portion
  source 1..22: mol_type = other RNA
aagatgataaaacgccgcagac

SEQ ID NO: 12909 - RNA, 22 nt, synthetic construct
  misc_feature 1..22: note = HBV-targeting guide sequence portion
  source 1..22: mol_type = other RNA
aagatgctgtacagacttggcc

SEQ ID NO: 12910 - RNA, 22 nt, synthetic construct
  misc_feature 1..22: note = HBV-targeting guide sequence portion
  source 1..22: mol_type = other RNA
aagattctgccccatgctgtag

SEQ ID NO: 12911 - RNA, 22 nt, synthetic construct
  misc_feature 1..22: note = HBV-targeting guide sequence portion
  source 1..22: mol_type = other RNA
aagattgacgatatgtgagagg

SEQ ID NO: 12912 - RNA, 22 nt, synthetic construct
  misc_feature 1..22: note = HBV-targeting guide sequence portion
  source 1..22: mol_type = other RNA
aagcaattctttgctggggaga

SEQ ID NO: 12913 - RNA, 22 nt, synthetic construct
  misc_feature 1..22: note = HBV-targeting guide sequence portion
  source 1..22: mol_type = other RNA
aagcaggataaccacattgtgt

SEQ ID NO: 12914 - RNA, 22 nt, synthetic construct
  misc_feature 1..22: note = HBV-targeting guide sequence portion
  source 1..22: mol_type = other RNA
aagcaggctttcactttttcgc

SEQ ID NO: 12915 - RNA, 22 nt, synthetic construct
  misc_feature 1..22: note = HBV-targeting guide sequence portion
  source 1..22: mol_type = other RNA
aagcatctagggacctagtagt

SEQ ID NO: 12916 - RNA, 22 nt, synthetic construct
  misc_feature 1..22: note = HBV-targeting guide sequence portion
  source 1..22: mol_type = other RNA
aagccaaacagtgggggaaagc

SEQ ID NO: 12917 - RNA, 22 nt, synthetic construct
  misc_feature 1..22: note = HBV-targeting guide sequence portion
  source 1..22: mol_type = other RNA
aagccacccaaggcacagcttg

SEQ ID NO: 12918 - RNA, 22 nt, synthetic construct
  misc_feature 1..22: note = HBV-targeting guide sequence portion
  source 1..22: mol_type = other RNA
aagcccaggatgatgggatggg

SEQ ID NO: 12919 - RNA, 22 nt, synthetic construct
  misc_feature 1..22: note = HBV-targeting guide sequence portion
  source 1..22: mol_type = other RNA
aagccccaaccagtgggggttg

SEQ ID NO: 12920 - RNA, 22 nt, synthetic construct
  misc_feature 1..22: note = HBV-targeting guide sequence portion
  source 1..22: mol_type = other RNA
aagccccgtaaaatttcccacc

SEQ ID NO: 12921 - RNA, 22 nt, synthetic construct
  misc_feature 1..22: note = HBV-targeting guide sequence portion
  source 1..22: mol_type = other RNA
aagccctacgaaccactgaaca

SEQ ID NO: 12922 - RNA, 22 nt, synthetic construct
  misc_feature 1..22: note = HBV-targeting guide sequence portion
  source 1..22: mol_type = other RNA
aagcctccaagctgtgccttgg

SEQ ID NO: 12923 - RNA, 22 nt, synthetic construct
  misc_feature 1..22: note = HBV-targeting guide sequence portion
  source 1..22: mol_type = other RNA
aagcctgcttagattgaataca

SEQ ID NO: 12924 - RNA, 22 nt, synthetic construct
  misc_feature 1..22: note = HBV-targeting guide sequence portion
  source 1..22: mol_type = other RNA
aagcgaagtgcacacggtccgg

SEQ ID NO: 12925 - RNA, 22 nt, synthetic construct
  misc_feature 1..22: note = HBV-targeting guide sequence portion
  source 1..22: mol_type = other RNA
aagcggcctcgagatgggtcgt

SEQ ID NO: 12926 - RNA, 22 nt, synthetic construct
  misc_feature 1..22: note = HBV-targeting guide sequence portion
  source 1..22: mol_type = other RNA
aagcggctaggagttccgcagt

SEQ ID NO: 12927 - RNA, 22 nt, synthetic construct
  misc_feature 1..22: note = HBV-targeting guide sequence portion
  source 1..22: mol_type = other RNA
aagcgggcctacaaactgttca

SEQ ID NO: 12928 - RNA, 22 nt, synthetic construct
  misc_feature 1..22: note = HBV-targeting guide sequence portion
  source 1..22: mol_type = other RNA
aagctggaggagtgcgaatcca

SEQ ID NO: 12929 - RNA, 22 nt, synthetic construct
  misc_feature 1..22: note = HBV-targeting guide sequence portion
  source 1..22: mol_type = other RNA
aagctgtgccttgggtggcttt

SEQ ID NO: 12930 - RNA, 22 nt, synthetic construct
  misc_feature 1..22: note = HBV-targeting guide sequence portion
  source 1..22: mol_type = other RNA
aaggaaaaccccgcctgtaaca

SEQ ID NO: 12931 - RNA, 22 nt, synthetic construct
  misc_feature 1..22: note = HBV-targeting guide sequence portion
  source 1..22: mol_type = other RNA
aaggaaagaagtcagaaggcaa

SEQ ID NO: 12932 - RNA, 22 nt, synthetic construct
  misc_feature 1..22: note = HBV-targeting guide sequence portion
  source 1..22: mol_type = other RNA
aaggaacctctatgtatccctc

SEQ ID NO: 12933 - RNA, 22 nt, synthetic construct
  misc_feature 1..22: note = HBV-targeting guide sequence portion
  source 1..22: mol_type = other RNA
aaggacgtcccgcgcaggatcc

SEQ ID NO: 12934 - RNA, 22 nt, synthetic construct
  misc_feature 1..22: note = HBV-targeting guide sequence portion
  source 1..22: mol_type = other RNA
aaggatccctggccagacgcca

SEQ ID NO: 12935 - RNA, 22 nt, synthetic construct
  misc_feature 1..22: note = HBV-targeting guide sequence portion
  source 1..22: mol_type = other RNA
aaggcaaaaacgagagtaactc

SEQ ID NO: 12936 - RNA, 22 nt, synthetic construct
  misc_feature 1..22: note = HBV-targeting guide sequence portion
  source 1..22: mol_type = other RNA
aaggcacagacggggagtccgc

SEQ ID NO: 12937 - RNA, 22 nt, synthetic construct
  misc_feature 1..22: note = HBV-targeting guide sequence portion
  source 1..22: mol_type = other RNA
aaggcacagcttggaggcttga

SEQ ID NO: 12938 - RNA, 22 nt, synthetic construct
  misc_feature 1..22: note = HBV-targeting guide sequence portion
  source 1..22: mol_type = other RNA
aaggcatcccgatacagagctg

SEQ ID NO: 12939 - RNA, 22 nt, synthetic construct
  misc_feature 1..22: note = HBV-targeting guide sequence portion
  source 1..22: mol_type = other RNA
aaggcctccgtgcggtggggtg

SEQ ID NO: 12940 - RNA, 22 nt, synthetic construct
  misc_feature 1..22: note = HBV-targeting guide sequence portion
  source 1..22: mol_type = other RNA
aaggccttgtaagttggcgaaa

SEQ ID NO: 12941 - RNA, 22 nt, synthetic construct
  misc_feature 1..22: note = HBV-targeting guide sequence portion
  source 1..22: mol_type = other RNA
aaggcctttctgtgtaaacaat

SEQ ID NO: 12942 - RNA, 22 nt, synthetic construct
  misc_feature 1..22: note = HBV-targeting guide sequence portion
  source 1..22: mol_type = other RNA
aaggcgggtgttttatataaga

SEQ ID NO: 12943 - RNA, 22 nt, synthetic construct
  misc_feature 1..22: note = HBV-targeting guide sequence portion
  source 1..22: mol_type = other RNA
aaggctgggtccaactggtggt

SEQ ID NO: 12944 - RNA, 22 nt, synthetic construct
  misc_feature 1..22: note = HBV-targeting guide sequence portion
  source 1..22: mol_type = other RNA
aagggactcaagatgctgtaca

SEQ ID NO: 12945 - RNA, 22 nt, synthetic construct
  misc_feature 1..22: note = HBV-targeting guide sequence portion
  source 1..22: mol_type = other RNA
aagggatactaacattgagatc

SEQ ID NO: 12946 - RNA, 22 nt, synthetic construct
  misc_feature 1..22: note = HBV-targeting guide sequence portion
  source 1..22: mol_type = other RNA
aagggcaagtatttggtgaatt

SEQ ID NO: 12947 - RNA, 22 nt, synthetic construct
  misc_feature 1..22: note = HBV-targeting guide sequence portion
  source 1..22: mol_type = other RNA
aagggcattaaagcaggataac

SEQ ID NO: 12948 - RNA, 22 nt, synthetic construct
  misc_feature 1..22: note = HBV-targeting guide sequence portion
  source 1..22: mol_type = other RNA
aaggggcagcaaaacccagaag

SEQ ID NO: 12949 - RNA, 22 nt, synthetic construct
  misc_feature 1..22: note = HBV-targeting guide sequence portion
  source 1..22: mol_type = other RNA
aagggtattaaaccttattatc

SEQ ID NO: 12950 - RNA, 22 nt, synthetic construct
  misc_feature 1..22: note = HBV-targeting guide sequence portion
  source 1..22: mol_type = other RNA
aaggtaggagctggagcattcg

SEQ ID NO: 12951 - RNA, 22 nt, synthetic construct
  misc_feature 1..22: note = HBV-targeting guide sequence portion
  source 1..22: mol_type = other RNA
aaggtatgtttcccgtctgtcc

SEQ ID NO: 12952 - RNA, 22 nt, synthetic construct
  misc_feature 1..22: note = HBV-targeting guide sequence portion
  source 1..22: mol_type = other RNA
aaggtcggtcgttgacattgca

SEQ ID NO: 12953 - RNA, 22 nt, synthetic construct
  misc_feature 1..22: note = HBV-targeting guide sequence portion
  source 1..22: mol_type = other RNA
aaggtcttacataagaggactc

SEQ ID NO: 12954 - RNA, 22 nt, synthetic construct
  misc_feature 1..22: note = HBV-targeting guide sequence portion
  source 1..22: mol_type = other RNA
aaggtgggaaattttacggggc

SEQ ID NO: 12955 - RNA, 22 nt, synthetic construct
  misc_feature 1..22: note = HBV-targeting guide sequence portion
  source 1..22: mol_type = other RNA
aaggttcaggtattgtttacac

SEQ ID NO: 12956 - RNA, 22 nt, synthetic construct
  misc_feature 1..22: note = HBV-targeting guide sequence portion
  source 1..22: mol_type = other RNA
aaggttccacgcatgcgctgat

SEQ ID NO: 12957 - RNA, 22 nt, synthetic construct
  misc_feature 1..22: note = HBV-targeting guide sequence portion
  source 1..22: mol_type = other RNA
aaggtttaatacccttatccaa

SEQ ID NO: 12958 - RNA, 22 nt, synthetic construct
  misc_feature 1..22: note = HBV-targeting guide sequence portion
  source 1..22: mol_type = other RNA
aaggtttgcattatgccctgag

SEQ ID NO: 12959 - RNA, 22 nt, synthetic construct
  misc_feature 1..22: note = HBV-targeting guide sequence portion
  source 1..22: mol_type = other RNA
aaggttttgtacagcaacagga

SEQ ID NO: 12960 - RNA, 22 nt, synthetic construct
  misc_feature 1..22: note = HBV-targeting guide sequence portion
  source 1..22: mol_type = other RNA
aagtaagacaagaaatgtgaaa

SEQ ID NO: 12961 - RNA, 22 nt, synthetic construct
  misc_feature 1..22: note = HBV-targeting guide sequence portion
  source 1..22: mol_type = other RNA
aagtaatgattaactagatgtt

SEQ ID NO: 12962 - RNA, 22 nt, synthetic construct
  misc_feature 1..22: note = HBV-targeting guide sequence portion
  source 1..22: mol_type = other RNA
aagtatgcctcaaggtcggtcg

SEQ ID NO: 12963 - RNA, 22 nt, synthetic construct
  misc_feature 1..22: note = HBV-targeting guide sequence portion
  source 1..22: mol_type = other RNA
aagtatttggtgaatttaggat

SEQ ID NO: 12964 - RNA, 22 nt, synthetic construct
  misc_feature 1..22: note = HBV-targeting guide sequence portion
  source 1..22: mol_type = other RNA
aagtcagaaggcaaaaacgaga

SEQ ID NO: 12965 - RNA, 22 nt, synthetic construct
  misc_feature 1..22: note = HBV-targeting guide sequence portion
  source 1..22: mol_type = other RNA
aagtccaccacgagtctagact

SEQ ID NO: 12966 - RNA, 22 nt, synthetic construct
  misc_feature 1..22: note = HBV-targeting guide sequence portion
  source 1..22: mol_type = other RNA
aagtcccaatctggattgttgg

SEQ ID NO: 12967 - RNA, 22 nt, synthetic construct
  misc_feature 1..22: note = HBV-targeting guide sequence portion
  source 1..22: mol_type = other RNA
aagtctccggaagtgttgatag

SEQ ID NO: 12968 - RNA, 22 nt, synthetic construct
  misc_feature 1..22: note = HBV-targeting guide sequence portion
  source 1..22: mol_type = other RNA
aagtctgtacagcatcttgagt

SEQ ID NO: 12969 - RNA, 22 nt, synthetic construct
  misc_feature 1..22: note = HBV-targeting guide sequence portion
  source 1..22: mol_type = other RNA
aagtgaaagcctgcttagattg

SEQ ID NO: 12970 - RNA, 22 nt, synthetic construct
  misc_feature 1..22: note = HBV-targeting guide sequence portion
  source 1..22: mol_type = other RNA
aagtgcacacggtccggcagat

SEQ ID NO: 12971 - RNA, 22 nt, synthetic construct
  misc_feature 1..22: note = HBV-targeting guide sequence portion
  source 1..22: mol_type = other RNA
aagtgtgtcaacgaattgtggg

SEQ ID NO: 12972 - RNA, 22 nt, synthetic construct
  misc_feature 1..22: note = HBV-targeting guide sequence portion
  source 1..22: mol_type = other RNA
aagtgttgataggataggggca

SEQ ID NO: 12973 - RNA, 22 nt, synthetic construct
  misc_feature 1..22: note = HBV-targeting guide sequence portion
  source 1..22: mol_type = other RNA
aagtgtttgctgatgcaacccc

SEQ ID NO: 12974 - RNA, 22 nt, synthetic construct
  misc_feature 1..22: note = HBV-targeting guide sequence portion
  source 1..22: mol_type = other RNA
aagttcagacaactattgtggt

SEQ ID NO: 12975 - RNA, 22 nt, synthetic construct
  misc_feature 1..22: note = HBV-targeting guide sequence portion
  source 1..22: mol_type = other RNA
aagttgcatggtgctggtgcgc

SEQ ID NO: 12976 - RNA, 22 nt, synthetic construct
  misc_feature 1..22: note = HBV-targeting guide sequence portion
  source 1..22: mol_type = other RNA
aagttggaggacaggaggttgg

SEQ ID NO: 12977 - RNA, 22 nt, synthetic construct
  misc_feature 1..22: note = HBV-targeting guide sequence portion
  source 1..22: mol_type = other RNA
aagttggcgaaaaagtgaaagc

SEQ ID NO: 12978 - RNA, 22 nt, synthetic construct
  misc_feature 1..22: note = HBV-targeting guide sequence portion
  source 1..22: mol_type = other RNA
aataaagccccgtaaaatttcc

SEQ ID NO: 12979 - RNA, 22 nt, synthetic construct
  misc_feature 1..22: note = HBV-targeting guide sequence portion
  source 1..22: mol_type = other RNA
aataaccccatctctttgtttt

SEQ ID NO: 12980 - RNA, 22 nt, synthetic construct
  misc_feature 1..22: note = HBV-targeting guide sequence portion
  source 1..22: mol_type = other RNA
aataaggtttaatacccttatc

SEQ ID NO: 12981 - RNA, 22 nt, synthetic construct
  misc_feature 1..22: note = HBV-targeting guide sequence portion
  source 1..22: mol_type = other RNA
aatacaggtgcagtttccatcc

SEQ ID NO: 12982 - RNA, 22 nt, synthetic construct
  misc_feature 1..22: note = HBV-targeting guide sequence portion
  source 1..22: mol_type = other RNA
aatacatgcatacaagggcatt

SEQ ID NO: 12983 - RNA, 22 nt, synthetic construct
  misc_feature 1..22: note = HBV-targeting guide sequence portion
  source 1..22: mol_type = other RNA
aataccacatcatccatataac

SEQ ID NO: 12984 - RNA, 22 nt, synthetic construct
  misc_feature 1..22: note = HBV-targeting guide sequence portion
  source 1..22: mol_type = other RNA
aatacccttatccaagggcaag

SEQ ID NO: 12985 - RNA, 22 nt, synthetic construct
  misc_feature 1..22: note = HBV-targeting guide sequence portion
  source 1..22: mol_type = other RNA
aataccgcagagtctagactcg

SEQ ID NO: 12986 - RNA, 22 nt, synthetic construct
  misc_feature 1..22: note = HBV-targeting guide sequence portion
  source 1..22: mol_type = other RNA
aatacctgaacctttaccccgt

SEQ ID NO: 12987 - RNA, 22 nt, synthetic construct
  misc_feature 1..22: note = HBV-targeting guide sequence portion
  source 1..22: mol_type = other RNA
aatactctaggaccgtttctct

SEQ ID NO: 12988 - RNA, 22 nt, synthetic construct
  misc_feature 1..22: note = HBV-targeting guide sequence portion
  source 1..22: mol_type = other RNA
aatacttgcccttggataaggg

SEQ ID NO: 12989 - RNA, 22 nt, synthetic construct
  misc_feature 1..22: note = HBV-targeting guide sequence portion
  source 1..22: mol_type = other RNA
aataggcctgttaaccgggagt

SEQ ID NO: 12990 - RNA, 22 nt, synthetic construct
  misc_feature 1..22: note = HBV-targeting guide sequence portion
  source 1..22: mol_type = other RNA
aatagtgtctagtttggaagta

SEQ ID NO: 12991 - RNA, 22 nt, synthetic construct
  misc_feature 1..22: note = HBV-targeting guide sequence portion
  source 1..22: mol_type = other RNA
aatagttgtctgaactttaggc

SEQ ID NO: 12992 - RNA, 22 nt, synthetic construct
  misc_feature 1..22: note = HBV-targeting guide sequence portion
  source 1..22: mol_type = other RNA
aatatacatcgttcccatggct

SEQ ID NO: 12993 - RNA, 22 nt, synthetic construct
  misc_feature 1..22: note = HBV-targeting guide sequence portion
  source 1..22: mol_type = other RNA
aatatacatctacaccaagata

SEQ ID NO: 12994 - RNA, 22 nt, synthetic construct
  misc_feature 1..22: note = HBV-targeting guide sequence portion
  source 1..22: mol_type = other RNA
aatatcttggtgtagatgtata

SEQ ID NO: 12995 - RNA, 22 nt, synthetic construct
  misc_feature 1..22: note = HBV-targeting guide sequence portion
  source 1..22: mol_type = other RNA
aatatggtgacccacagaatga

SEQ ID NO: 12996 - RNA, 22 nt, synthetic construct
  misc_feature 1..22: note = HBV-targeting guide sequence portion
  source 1..22: mol_type = other RNA
aatcaaagaatgtttcagaaaa

SEQ ID NO: 12997 - RNA, 22 nt, synthetic construct
  misc_feature 1..22: note = HBV-targeting guide sequence portion
  source 1..22: mol_type = other RNA
aatcaataggcctgttaaccgg

SEQ ID NO: 12998 - RNA, 22 nt, synthetic construct
  misc_feature 1..22: note = HBV-targeting guide sequence portion
  source 1..22: mol_type = other RNA
aatcaatgacatagcccatgaa

SEQ ID NO: 12999 - RNA, 22 nt, synthetic construct
  misc_feature 1..22: note = HBV-targeting guide sequence portion
  source 1..22: mol_type = other RNA
aatcaatttcaaccgtcttttc

SEQ ID NO: 13000 - RNA, 22 nt, synthetic construct
  misc_feature 1..22: note = HBV-targeting guide sequence portion
  source 1..22: mol_type = other RNA
aatcacatcatacacaaaatca

SEQ ID NO: 13001 - RNA, 22 nt, synthetic construct
  misc_feature 1..22: note = HBV-targeting guide sequence portion
  source 1..22: mol_type = other RNA
aatcactcaccaacctcctgtc

SEQ ID NO: 13002 - RNA, 22 nt, synthetic construct
  misc_feature 1..22: note = HBV-targeting guide sequence portion
  source 1..22: mol_type = other RNA
aatcatctcttgttcatgtcct

SEQ ID NO: 13003 - RNA, 22 nt, synthetic construct
  misc_feature 1..22: note = HBV-targeting guide sequence portion
  source 1..22: mol_type = other RNA
aatcattacttccaaactagac

SEQ ID NO: 13004 - RNA, 22 nt, synthetic construct
  misc_feature 1..22: note = HBV-targeting guide sequence portion
  source 1..22: mol_type = other RNA
aatccacactccaaaagacacc

SEQ ID NO: 13005 - RNA, 22 nt, synthetic construct
  misc_feature 1..22: note = HBV-targeting guide sequence portion
  source 1..22: mol_type = other RNA
aatccagattgggacttcaatc

SEQ ID NO: 13006 - RNA, 22 nt, synthetic construct
  misc_feature 1..22: note = HBV-targeting guide sequence portion
  source 1..22: mol_type = other RNA
aatcccaacaaggatccctggc

SEQ ID NO: 13007 - RNA, 22 nt, synthetic construct
  misc_feature 1..22: note = HBV-targeting guide sequence portion
  source 1..22: mol_type = other RNA
aatcccagaggattgctggtgg

SEQ ID NO: 13008 - RNA, 22 nt, synthetic construct
  misc_feature 1..22: note = HBV-targeting guide sequence portion
  source 1..22: mol_type = other RNA
aatcccgcggacgacccatctc

SEQ ID NO: 13009 - RNA, 22 nt, synthetic construct
  misc_feature 1..22: note = HBV-targeting guide sequence portion
  source 1..22: mol_type = other RNA
aatccgcctcctgcctctacca

SEQ ID NO: 13010 - RNA, 22 nt, synthetic construct
  misc_feature 1..22: note = HBV-targeting guide sequence portion
  source 1..22: mol_type = other RNA
aatcctcacaataccgcagagt

SEQ ID NO: 13011 - RNA, 22 nt, synthetic construct
  misc_feature 1..22: note = HBV-targeting guide sequence portion
  source 1..22: mol_type = other RNA
aatcctcgagaagattgacgat

SEQ ID NO: 13012 - RNA, 22 nt, synthetic construct
  misc_feature 1..22: note = HBV-targeting guide sequence portion
  source 1..22: mol_type = other RNA
aatcctctgggattctttcccg

SEQ ID NO: 13013 - RNA, 22 nt, synthetic construct
  misc_feature 1..22: note = HBV-targeting guide sequence portion
  source 1..22: mol_type = other RNA
aatcctgatgtgatgttctcca

SEQ ID NO: 13014 - RNA, 22 nt, synthetic construct
  misc_feature 1..22: note = HBV-targeting guide sequence portion
  source 1..22: mol_type = other RNA
aatcgccagtcaggacggcagc

SEQ ID NO: 13015 - RNA, 22 nt, synthetic construct
  misc_feature 1..22: note = HBV-targeting guide sequence portion
  source 1..22: mol_type = other RNA
aatcgccgcgtcgcagaagatc

SEQ ID NO: 13016 - RNA, 22 nt, synthetic construct
  misc_feature 1..22: note = HBV-targeting guide sequence portion
  source 1..22: mol_type = other RNA
aatctaagcaggctttcacttt

SEQ ID NO: 13017 - RNA, 22 nt, synthetic construct
  misc_feature 1..22: note = HBV-targeting guide sequence portion
  source 1..22: mol_type = other RNA
aatctaatctcctcccccaact

SEQ ID NO: 13018 - RNA, 22 nt, synthetic construct
  misc_feature 1..22: note = HBV-targeting guide sequence portion
  source 1..22: mol_type = other RNA
aatctcctcccccaactcctcc

SEQ ID NO: 13019 - RNA, 22 nt, synthetic construct
  misc_feature 1..22: note = HBV-targeting guide sequence portion
  source 1..22: mol_type = other RNA
aatctcggggatctcaatgtta

SEQ ID NO: 13020 - RNA, 22 nt, synthetic construct
  misc_feature 1..22: note = HBV-targeting guide sequence portion
  source 1..22: mol_type = other RNA
aatctggattgttggagtttgc

SEQ ID NO: 13021 - RNA, 22 nt, synthetic construct
  misc_feature 1..22: note = HBV-targeting guide sequence portion
  source 1..22: mol_type = other RNA
aatcttctcgaggattggggac

SEQ ID NO: 13022 - RNA, 22 nt, synthetic construct
  misc_feature 1..22: note = HBV-targeting guide sequence portion
  source 1..22: mol_type = other RNA
aatctttccaccagcaatcctc

SEQ ID NO: 13023 - RNA, 22 nt, synthetic construct
  misc_feature 1..22: note = HBV-targeting guide sequence portion
  source 1..22: mol_type = other RNA
aatgacatagcccatgaaatta

SEQ ID NO: 13024 - RNA, 22 nt, synthetic construct
  misc_feature 1..22: note = HBV-targeting guide sequence portion
  source 1..22: mol_type = other RNA
aatgactctagctacctgggtg

SEQ ID NO: 13025 - RNA, 22 nt, synthetic construct
  misc_feature 1..22: note = HBV-targeting guide sequence portion
  source 1..22: mol_type = other RNA
aatgagaaaagacggttgaaat

SEQ ID NO: 13026 - RNA, 22 nt, synthetic construct
  misc_feature 1..22: note = HBV-targeting guide sequence portion
  source 1..22: mol_type = other RNA
aatgaggcgctatgtgttgaca

SEQ ID NO: 13027 - RNA, 22 nt, synthetic construct
  misc_feature 1..22: note = HBV-targeting guide sequence portion
  source 1..22: mol_type = other RNA
aatgagggttaaagacaggtac

SEQ ID NO: 13028 - RNA, 22 nt, synthetic construct
  misc_feature 1..22: note = HBV-targeting guide sequence portion
  source 1..22: mol_type = other RNA
aatgatccccaacaatcaatga

SEQ ID NO: 13029 - RNA, 22 nt, synthetic construct
  misc_feature 1..22: note = HBV-targeting guide sequence portion
  source 1..22: mol_type = other RNA
aatgatctttgtactaggaggc

SEQ ID NO: 13030 - RNA, 22 nt, synthetic construct
  misc_feature 1..22: note = HBV-targeting guide sequence portion
  source 1..22: mol_type = other RNA
aatgattaactagatgttctgg

SEQ ID NO: 13031 - RNA, 22 nt, synthetic construct
  misc_feature 1..22: note = HBV-targeting guide sequence portion
  source 1..22: mol_type = other RNA
aatgcaaaccttgccagcaaat

SEQ ID NO: 13032 - RNA, 22 nt, synthetic construct
  misc_feature 1..22: note = HBV-targeting guide sequence portion
  source 1..22: mol_type = other RNA
aatgcccctatcctatcaacac

SEQ ID NO: 13033 - RNA, 22 nt, synthetic construct
  misc_feature 1..22: note = HBV-targeting guide sequence portion
  source 1..22: mol_type = other RNA
aatgcccttgtatgcatgtatt

SEQ ID NO: 13034 - RNA, 22 nt, synthetic construct
  misc_feature 1..22: note = HBV-targeting guide sequence portion
  source 1..22: mol_type = other RNA
aatgctcaggagactccaaggc

SEQ ID NO: 13035 - RNA, 22 nt, synthetic construct
  misc_feature 1..22: note = HBV-targeting guide sequence portion
  source 1..22: mol_type = other RNA
aatgctccagctcctaccttgt

SEQ ID NO: 13036 - RNA, 22 nt, synthetic construct
  misc_feature 1..22: note = HBV-targeting guide sequence portion
  source 1..22: mol_type = other RNA
aatggcactagtaaactgagcc

SEQ ID NO: 13037 - RNA, 22 nt, synthetic construct
  misc_feature 1..22: note = HBV-targeting guide sequence portion
  source 1..22: mol_type = other RNA
aatgtacacccaaagacaaaag

SEQ ID NO: 13038 - RNA, 22 nt, synthetic construct
  misc_feature 1..22: note = HBV-targeting guide sequence portion
  source 1..22: mol_type = other RNA
aatgtcaacgaccgaccttgag

SEQ ID NO: 13039 - RNA, 22 nt, synthetic construct
  misc_feature 1..22: note = HBV-targeting guide sequence portion
  source 1..22: mol_type = other RNA
aatgtccatgccctaaagccac

SEQ ID NO: 13040 - RNA, 22 nt, synthetic construct
  misc_feature 1..22: note = HBV-targeting guide sequence portion
  source 1..22: mol_type = other RNA
aatgtgaaaccacaatagttgt

SEQ ID NO: 13041 - RNA, 22 nt, synthetic construct
  misc_feature 1..22: note = HBV-targeting guide sequence portion
  source 1..22: mol_type = other RNA
aatgtgaacagtttgtaggccc

SEQ ID NO: 13042 - RNA, 22 nt, synthetic construct
  misc_feature 1..22: note = HBV-targeting guide sequence portion
  source 1..22: mol_type = other RNA
aatgtggttatcctgctttaat

SEQ ID NO: 13043 - RNA, 22 nt, synthetic construct
  misc_feature 1..22: note = HBV-targeting guide sequence portion
  source 1..22: mol_type = other RNA
aatgttagtatcccttggactc

SEQ ID NO: 13044 - RNA, 22 nt, synthetic construct
  misc_feature 1..22: note = HBV-targeting guide sequence portion
  source 1..22: mol_type = other RNA
aatgtttcagaaaactcccggt

SEQ ID NO: 13045 - RNA, 22 nt, synthetic construct
  misc_feature 1..22: note = HBV-targeting guide sequence portion
  source 1..22: mol_type = other RNA
aatgtttgctccagaccggctg

SEQ ID NO: 13046 - RNA, 22 nt, synthetic construct
  misc_feature 1..22: note = HBV-targeting guide sequence portion
  source 1..22: mol_type = other RNA
aattaagagaataaccccatct

SEQ ID NO: 13047 - RNA, 22 nt, synthetic construct
  misc_feature 1..22: note = HBV-targeting guide sequence portion
  source 1..22: mol_type = other RNA
aattagaggacagacgggaaac

SEQ ID NO: 13048 - RNA, 22 nt, synthetic construct
  misc_feature 1..22: note = HBV-targeting guide sequence portion
  source 1..22: mol_type = other RNA
aattagtacccacccaggtagc

SEQ ID NO: 13049 - RNA, 22 nt, synthetic construct
  misc_feature 1..22: note = HBV-targeting guide sequence portion
  source 1..22: mol_type = other RNA
aattcaccaaatacttgccctt

SEQ ID NO: 13050 - RNA, 22 nt, synthetic construct
  misc_feature 1..22: note = HBV-targeting guide sequence portion
  source 1..22: mol_type = other RNA
aattccaggatcatcaaccacc

SEQ ID NO: 13051 - RNA, 22 nt, synthetic construct
  misc_feature 1..22: note = HBV-targeting guide sequence portion
  source 1..22: mol_type = other RNA
aattcctatgggagtgggcctc

SEQ ID NO: 13052 - RNA, 22 nt, synthetic construct
  misc_feature 1..22: note = HBV-targeting guide sequence portion
  source 1..22: mol_type = other RNA
aattcgcagtccccaacctcca

SEQ ID NO: 13053 - RNA, 22 nt, synthetic construct
  misc_feature 1..22: note = HBV-targeting guide sequence portion
  source 1..22: mol_type = other RNA
aattcgttgacacactttccaa

SEQ ID NO: 13054 - RNA, 22 nt, synthetic construct
  misc_feature 1..22: note = HBV-targeting guide sequence portion
  source 1..22: mol_type = other RNA
aattcttgcccaaggtcttaca

SEQ ID NO: 13055 - RNA, 22 nt, synthetic construct
  misc_feature 1..22: note = HBV-targeting guide sequence portion
  source 1..22: mol_type = other RNA
aattctttatatgggtcaatgt

SEQ ID NO: 13056 - RNA, 22 nt, synthetic construct
  misc_feature 1..22: note = HBV-targeting guide sequence portion
  source 1..22: mol_type = other RNA
aattctttgctggggagaacta

SEQ ID NO: 13057 - RNA, 22 nt, synthetic construct
  misc_feature 1..22: note = HBV-targeting guide sequence portion
  source 1..22: mol_type = other RNA
aattgagagaagtccaccacga

SEQ ID NO: 13058 - RNA, 22 nt, synthetic construct
  misc_feature 1..22: note = HBV-targeting guide sequence portion
  source 1..22: mol_type = other RNA
aattgattatgcctgctaggtt

SEQ ID NO: 13059 - RNA, 22 nt, synthetic construct
  misc_feature 1..22: note = HBV-targeting guide sequence portion
  source 1..22: mol_type = other RNA
aattgcttgcctgagtgcagta

SEQ ID NO: 13060 - RNA, 22 nt, synthetic construct
  misc_feature 1..22: note = HBV-targeting guide sequence portion
  source 1..22: mol_type = other RNA
aattggtaacagcggtataaag

SEQ ID NO: 13061 - RNA, 22 nt, synthetic construct
  misc_feature 1..22: note = HBV-targeting guide sequence portion
  source 1..22: mol_type = other RNA
aattggtctgcgcaccagcacc

SEQ ID NO: 13062 - RNA, 22 nt, synthetic construct
  misc_feature 1..22: note = HBV-targeting guide sequence portion
  source 1..22: mol_type = other RNA
aattggtgggcgttcacggtgg

SEQ ID NO: 13063 - RNA, 22 nt, synthetic construct
  misc_feature 1..22: note = HBV-targeting guide sequence portion
  source 1..22: mol_type = other RNA
aattgtgggtcttctgggtttt

SEQ ID NO: 13064 - RNA, 22 nt, synthetic construct
  misc_feature 1..22: note = HBV-targeting guide sequence portion
  source 1..22: mol_type = other RNA
aatttagaagatcaagcatcta

SEQ ID NO: 13065 - RNA, 22 nt, synthetic construct
  misc_feature 1..22: note = HBV-targeting guide sequence portion
  source 1..22: mol_type = other RNA
aatttaggataaaacctagcag

SEQ ID NO: 13066 - RNA, 22 nt, synthetic construct
  misc_feature 1..22: note = HBV-targeting guide sequence portion
  source 1..22: mol_type = other RNA
aatttatgcctacagcctccta

SEQ ID NO: 13067 - RNA, 22 nt, synthetic construct
  misc_feature 1..22: note = HBV-targeting guide sequence portion
  source 1..22: mol_type = other RNA
aatttcaaccgtcttttctcat

SEQ ID NO: 13068 - RNA, 22 nt, synthetic construct
  misc_feature 1..22: note = HBV-targeting guide sequence portion
  source 1..22: mol_type = other RNA
aatttcatgggctatgtcattg

SEQ ID NO: 13069 - RNA, 22 nt, synthetic construct
  misc_feature 1..22: note = HBV-targeting guide sequence portion
  source 1..22: mol_type = other RNA
aatttcccaccttatgagtcca

SEQ ID NO: 13070 - RNA, 22 nt, synthetic construct
  misc_feature 1..22: note = HBV-targeting guide sequence portion
  source 1..22: mol_type = other RNA
aatttggagctactgtggagtt

SEQ ID NO: 13071 - RNA, 22 nt, synthetic construct
  misc_feature 1..22: note = HBV-targeting guide sequence portion
  source 1..22: mol_type = other RNA
aattttacggggctttattctt

SEQ ID NO: 13072 - RNA, 22 nt, synthetic construct
  misc_feature 1..22: note = HBV-targeting guide sequence portion
  source 1..22: mol_type = other RNA
aattttccgaaagcccaggatg

SEQ ID NO: 13073 - RNA, 22 nt, synthetic construct
  misc_feature 1..22: note = HBV-targeting guide sequence portion
  source 1..22: mol_type = other RNA
aattttctagggggaactaccg

SEQ ID NO: 13074 - RNA, 22 nt, synthetic construct
  misc_feature 1..22: note = HBV-targeting guide sequence portion
  source 1..22: mol_type = other RNA
aattttcttttgtctttgggtg

SEQ ID NO: 13075 - RNA, 22 nt, synthetic construct
  misc_feature 1..22: note = HBV-targeting guide sequence portion
  source 1..22: mol_type = other RNA
aattttggccaagacacacggt

SEQ ID NO: 13076 - RNA, 22 nt, synthetic construct
  misc_feature 1..22: note = HBV-targeting guide sequence portion
  source 1..22: mol_type = other RNA
acaaaacaaagagatggggtta

SEQ ID NO: 13077 - RNA, 22 nt, synthetic construct
  misc_feature 1..22: note = HBV-targeting guide sequence portion
  source 1..22: mol_type = other RNA
acaaaaccttcggatggaaact

SEQ ID NO: 13078 - RNA, 22 nt, synthetic construct
  misc_feature 1..22: note = HBV-targeting guide sequence portion
  source 1..22: mol_type = other RNA
acaaaagaaaattggtaacagc

SEQ ID NO: 13079 - RNA, 22 nt, synthetic construct
  misc_feature 1..22: note = HBV-targeting guide sequence portion
  source 1..22: mol_type = other RNA
acaaaatcaaagaatgtttcag

SEQ ID NO: 13080 - RNA, 22 nt, synthetic construct
  misc_feature 1..22: note = HBV-targeting guide sequence portion
  source 1..22: mol_type = other RNA
acaaaatcacatcatacacaaa

SEQ ID NO: 13081 - RNA, 22 nt, synthetic construct
  misc_feature 1..22: note = HBV-targeting guide sequence portion
  source 1..22: mol_type = other RNA
acaaacagtctttgaagtatgc

SEQ ID NO: 13082 - RNA, 22 nt, synthetic construct
  misc_feature 1..22: note = HBV-targeting guide sequence portion
  source 1..22: mol_type = other RNA
acaaactgttcacattttttga

SEQ ID NO: 13083 - RNA, 22 nt, synthetic construct
  misc_feature 1..22: note = HBV-targeting guide sequence portion
  source 1..22: mol_type = other RNA
acaaagagatggggttattctc

SEQ ID NO: 13084 - RNA, 22 nt, synthetic construct
  misc_feature 1..22: note = HBV-targeting guide sequence portion
  source 1..22: mol_type = other RNA
acaaagatcattaatctaatct

SEQ ID NO: 13085 - RNA, 22 nt, synthetic construct
  misc_feature 1..22: note = HBV-targeting guide sequence portion
  source 1..22: mol_type = other RNA
acaaaggacgtcccgcgcagga

SEQ ID NO: 13086 - RNA, 22 nt, synthetic construct
  misc_feature 1..22: note = HBV-targeting guide sequence portion
  source 1..22: mol_type = other RNA
acaaatggcactagtaaactga

SEQ ID NO: 13087 - RNA, 22 nt, synthetic construct
  misc_feature 1..22: note = HBV-targeting guide sequence portion
  source 1..22: mol_type = other RNA
acaacacaagtctccggaagtg

SEQ ID NO: 13088 - RNA, 22 nt, synthetic construct
  misc_feature 1..22: note = HBV-targeting guide sequence portion
  source 1..22: mol_type = other RNA
acaacagagttgtcagtcccga

SEQ ID NO: 13089 - RNA, 22 nt, synthetic construct
  misc_feature 1..22: note = HBV-targeting guide sequence portion
  source 1..22: mol_type = other RNA
acaaccttccaccaaactctgc

SEQ ID NO: 13090 - RNA, 22 nt, synthetic construct
  misc_feature 1..22: note = HBV-targeting guide sequence portion
  source 1..22: mol_type = other RNA
acaactattgtggtttcacatt

SEQ ID NO: 13091 - RNA, 22 nt, synthetic construct
  misc_feature 1..22: note = HBV-targeting guide sequence portion
  source 1..22: mol_type = other RNA
acaactctgttgtcctctcccg

SEQ ID NO: 13092 - RNA, 22 nt, synthetic construct
  misc_feature 1..22: note = HBV-targeting guide sequence portion
  source 1..22: mol_type = other RNA
acaagaaatgtgaaaccacaat

SEQ ID NO: 13093 - RNA, 22 nt, synthetic construct
  misc_feature 1..22: note = HBV-targeting guide sequence portion
  source 1..22: mol_type = other RNA
acaagaagatgaggcatagcag

SEQ ID NO: 13094 - RNA, 22 nt, synthetic construct
  misc_feature 1..22: note = HBV-targeting guide sequence portion
  source 1..22: mol_type = other RNA
acaagaatcctcacaataccgc

SEQ ID NO: 13095 - RNA, 22 nt, synthetic construct
  misc_feature 1..22: note = HBV-targeting guide sequence portion
  source 1..22: mol_type = other RNA
acaagagatgattaggcagagg

SEQ ID NO: 13096 - RNA, 22 nt, synthetic construct
  misc_feature 1..22: note = HBV-targeting guide sequence portion
  source 1..22: mol_type = other RNA
acaagagctacagcatggggca

SEQ ID NO: 13097 - RNA, 22 nt, synthetic construct
  misc_feature 1..22: note = HBV-targeting guide sequence portion
  source 1..22: mol_type = other RNA
acaagcggctaggagttccgca

SEQ ID NO: 13098 - RNA, 22 nt, synthetic construct
  misc_feature 1..22: note = HBV-targeting guide sequence portion
  source 1..22: mol_type = other RNA
acaaggaaaaccccgcctgtaa

SEQ ID NO: 13099 - RNA, 22 nt, synthetic construct
  misc_feature 1..22: note = HBV-targeting guide sequence portion
  source 1..22: mol_type = other RNA
acaaggatccctggccagacgc

SEQ ID NO: 13100 - RNA, 22 nt, synthetic construct
  misc_feature 1..22: note = HBV-targeting guide sequence portion
  source 1..22: mol_type = other RNA
acaaggcctttctgtgtaaaca

SEQ ID NO: 13101 - RNA, 22 nt, synthetic construct
  misc_feature 1..22: note = HBV-targeting guide sequence portion
  source 1..22: mol_type = other RNA
acaagggcattaaagcaggata

SEQ ID NO: 13102 - RNA, 22 nt, synthetic construct
  misc_feature 1..22: note = HBV-targeting guide sequence portion
  source 1..22: mol_type = other RNA
acaaggtaggagctggagcatt

SEQ ID NO: 13103 - RNA, 22 nt, synthetic construct
  misc_feature 1..22: note = HBV-targeting guide sequence portion
  source 1..22: mol_type = other RNA
acaagtctccggaagtgttgat

SEQ ID NO: 13104 - RNA, 22 nt, synthetic construct
  misc_feature 1..22: note = HBV-targeting guide sequence portion
  source 1..22: mol_type = other RNA
acaagttggaggacaggaggtt

SEQ ID NO: 13105 - RNA, 22 nt, synthetic construct
  misc_feature 1..22: note = HBV-targeting guide sequence portion
  source 1..22: mol_type = other RNA
acaataccgcagagtctagact

SEQ ID NO: 13106 - RNA, 22 nt, synthetic construct
  misc_feature 1..22: note = HBV-targeting guide sequence portion
  source 1..22: mol_type = other RNA
acaatacctgaacctttacccc

SEQ ID NO: 13107 - RNA, 22 nt, synthetic construct
  misc_feature 1..22: note = HBV-targeting guide sequence portion
  source 1..22: mol_type = other RNA
acaatagttgtctgaactttag

SEQ ID NO: 13108 - RNA, 22 nt, synthetic construct
  misc_feature 1..22: note = HBV-targeting guide sequence portion
  source 1..22: mol_type = other RNA
acaatcaatgacatagcccatg

SEQ ID NO: 13109 - RNA, 22 nt, synthetic construct
  misc_feature 1..22: note = HBV-targeting guide sequence portion
  source 1..22: mol_type = other RNA
acaatccagattgggacttcaa

SEQ ID NO: 13110 - RNA, 22 nt, synthetic construct
  misc_feature 1..22: note = HBV-targeting guide sequence portion
  source 1..22: mol_type = other RNA
acaatgctcaggagactccaag

SEQ ID NO: 13111 - RNA, 22 nt, synthetic construct
  misc_feature 1..22: note = HBV-targeting guide sequence portion
  source 1..22: mol_type = other RNA
acaatgtggttatcctgcttta

SEQ ID NO: 13112 - RNA, 22 nt, synthetic construct
  misc_feature 1..22: note = HBV-targeting guide sequence portion
  source 1..22: mol_type = other RNA
acaattcgttgacacactttcc

SEQ ID NO: 13113 - RNA, 22 nt, synthetic construct
  misc_feature 1..22: note = HBV-targeting guide sequence portion
  source 1..22: mol_type = other RNA
acacaaaatcaaagaatgtttc

SEQ ID NO: 13114 - RNA, 22 nt, synthetic construct
  misc_feature 1..22: note = HBV-targeting guide sequence portion
  source 1..22: mol_type = other RNA
acacaagtctccggaagtgttg

SEQ ID NO: 13115 - RNA, 22 nt, synthetic construct
  misc_feature 1..22: note = HBV-targeting guide sequence portion
  source 1..22: mol_type = other RNA
acacaatgtggttatcctgctt

SEQ ID NO: 13116 - RNA, 22 nt, synthetic construct
  misc_feature 1..22: note = HBV-targeting guide sequence portion
  source 1..22: mol_type = other RNA
acacacggtagttccccctaga

SEQ ID NO: 13117 - RNA, 22 nt, synthetic construct
  misc_feature 1..22: note = HBV-targeting guide sequence portion
  source 1..22: mol_type = other RNA
acacactctatggaaggcgggt

SEQ ID NO: 13118 - RNA, 22 nt, synthetic construct
  misc_feature 1..22: note = HBV-targeting guide sequence portion
  source 1..22: mol_type = other RNA
acacactttccaatcaataggc

SEQ ID NO: 13119 - RNA, 22 nt, synthetic construct
  misc_feature 1..22: note = HBV-targeting guide sequence portion
  source 1..22: mol_type = other RNA
acacagaaaggccttgtaagtt

SEQ ID NO: 13120 - RNA, 22 nt, synthetic construct
  misc_feature 1..22: note = HBV-targeting guide sequence portion
  source 1..22: mol_type = other RNA
acacatagcgcctcattctgtg

SEQ ID NO: 13121 - RNA, 22 nt, synthetic construct
  misc_feature 1..22: note = HBV-targeting guide sequence portion
  source 1..22: mol_type = other RNA
acacatccagcgataaccagga

SEQ ID NO: 13122 - RNA, 22 nt, synthetic construct
  misc_feature 1..22: note = HBV-targeting guide sequence portion
  source 1..22: mol_type = other RNA
acaccaaatactctaggaccgt

SEQ ID NO: 13123 - RNA, 22 nt, synthetic construct
  misc_feature 1..22: note = HBV-targeting guide sequence portion
  source 1..22: mol_type = other RNA
acaccaagatattatcaaaaaa

SEQ ID NO: 13124 - RNA, 22 nt, synthetic construct
  misc_feature 1..22: note = HBV-targeting guide sequence portion
  source 1..22: mol_type = other RNA
acacccaaagacaaaagaaaat

SEQ ID NO: 13125 - RNA, 22 nt, synthetic construct
  misc_feature 1..22: note = HBV-targeting guide sequence portion
  source 1..22: mol_type = other RNA
acacccgccttccatagagtgt

SEQ ID NO: 13126 - RNA, 22 nt, synthetic construct
  misc_feature 1..22: note = HBV-targeting guide sequence portion
  source 1..22: mol_type = other RNA
acaccctcttttcctaatatac

SEQ ID NO: 13127 - RNA, 22 nt, synthetic construct
  misc_feature 1..22: note = HBV-targeting guide sequence portion
  source 1..22: mol_type = other RNA
acacgagcaggggtcctaggaa

SEQ ID NO: 13128 - RNA, 22 nt, synthetic construct
  misc_feature 1..22: note = HBV-targeting guide sequence portion
  source 1..22: mol_type = other RNA
acacggtagttccccctagaaa

SEQ ID NO: 13129 - RNA, 22 nt, synthetic construct
  misc_feature 1..22: note = HBV-targeting guide sequence portion
  source 1..22: mol_type = other RNA
acacggtccggcagatgagaag

SEQ ID NO: 13130 - RNA, 22 nt, synthetic construct
  misc_feature 1..22: note = HBV-targeting guide sequence portion
  source 1..22: mol_type = other RNA
acactatttacacactctatgg

SEQ ID NO: 13131 - RNA, 22 nt, synthetic construct
  misc_feature 1..22: note = HBV-targeting guide sequence portion
  source 1..22: mol_type = other RNA
acactcatatgggcctaaagtt

SEQ ID NO: 13132 - RNA, 22 nt, synthetic construct
  misc_feature 1..22: note = HBV-targeting guide sequence portion
  source 1..22: mol_type = other RNA
acactccaaaagacaccaaata

SEQ ID NO: 13133 - RNA, 22 nt, synthetic construct
  misc_feature 1..22: note = HBV-targeting guide sequence portion
  source 1..22: mol_type = other RNA
acactctatggaaggcgggtgt

SEQ ID NO: 13134 - RNA, 22 nt, synthetic construct
  misc_feature 1..22: note = HBV-targeting guide sequence portion
  source 1..22: mol_type = other RNA
acactctcttatataaaacacc

SEQ ID NO: 13135 - RNA, 22 nt, synthetic construct
  misc_feature 1..22: note = HBV-targeting guide sequence portion
  source 1..22: mol_type = other RNA
acacttccggagacttgtgttg

SEQ ID NO: 13136 - RNA, 22 nt, synthetic construct
  misc_feature 1..22: note = HBV-targeting guide sequence portion
  source 1..22: mol_type = other RNA
acacttggcacagacctggccg

SEQ ID NO: 13137 - RNA, 22 nt, synthetic construct
  misc_feature 1..22: note = HBV-targeting guide sequence portion
  source 1..22: mol_type = other RNA
acactttccaatcaataggcct

SEQ ID NO: 13138 - RNA, 22 nt, synthetic construct
  misc_feature 1..22: note = HBV-targeting guide sequence portion
  source 1..22: mol_type = other RNA
acagaaaggccttgtaagttgg

SEQ ID NO: 13139 - RNA, 22 nt, synthetic construct
  misc_feature 1..22: note = HBV-targeting guide sequence portion
  source 1..22: mol_type = other RNA
acagaatgaggcgctatgtgtt

SEQ ID NO: 13140 - RNA, 22 nt, synthetic construct
  misc_feature 1..22: note = HBV-targeting guide sequence portion
  source 1..22: mol_type = other RNA
acagacctggccgttgcctggc

SEQ ID NO: 13141 - RNA, 22 nt, synthetic construct
  misc_feature 1..22: note = HBV-targeting guide sequence portion
  source 1..22: mol_type = other RNA
acagacgggaaacataccttga

SEQ ID NO: 13142 - RNA, 22 nt, synthetic construct
  misc_feature 1..22: note = HBV-targeting guide sequence portion
  source 1..22: mol_type = other RNA
acagacggggagtccgcgtaaa

SEQ ID NO: 13143 - RNA, 22 nt, synthetic construct
  misc_feature 1..22: note = HBV-targeting guide sequence portion
  source 1..22: mol_type = other RNA
acagacttggcccccaatacca

SEQ ID NO: 13144 - RNA, 22 nt, synthetic construct
  misc_feature 1..22: note = HBV-targeting guide sequence portion
  source 1..22: mol_type = other RNA
acagagctgcggcggtatctag

SEQ ID NO: 13145 - RNA, 22 nt, synthetic construct
  misc_feature 1..22: note = HBV-targeting guide sequence portion
  source 1..22: mol_type = other RNA
acagagttgtcagtcccgagaa

SEQ ID NO: 13146 - RNA, 22 nt, synthetic construct
  misc_feature 1..22: note = HBV-targeting guide sequence portion
  source 1..22: mol_type = other RNA
acagcaacaggagggatacata

SEQ ID NO: 13147 - RNA, 22 nt, synthetic construct
  misc_feature 1..22: note = HBV-targeting guide sequence portion
  source 1..22: mol_type = other RNA
acagcatcttgagtccctttat

SEQ ID NO: 13148 - RNA, 22 nt, synthetic construct
  misc_feature 1..22: note = HBV-targeting guide sequence portion
  source 1..22: mol_type = other RNA
acagcatggggcagaatctttc

SEQ ID NO: 13149 - RNA, 22 nt, synthetic construct
  misc_feature 1..22: note = HBV-targeting guide sequence portion
  source 1..22: mol_type = other RNA
acagcctagcagccatgggaac

SEQ ID NO: 13150 - RNA, 22 nt, synthetic construct
  misc_feature 1..22: note = HBV-targeting guide sequence portion
  source 1..22: mol_type = other RNA
acagcctcctagtacaaagatc

SEQ ID NO: 13151 - RNA, 22 nt, synthetic construct
  misc_feature 1..22: note = HBV-targeting guide sequence portion
  source 1..22: mol_type = other RNA
acagcggggtaggctgccgtcc

SEQ ID NO: 13152 - RNA, 22 nt, synthetic construct
  misc_feature 1..22: note = HBV-targeting guide sequence portion
  source 1..22: mol_type = other RNA
acagcggtataaagggactcaa

SEQ ID NO: 13153 - RNA, 22 nt, synthetic construct
  misc_feature 1..22: note = HBV-targeting guide sequence portion
  source 1..22: mol_type = other RNA
acagcttggaggcttgaacagt

SEQ ID NO: 13154 - RNA, 22 nt, synthetic construct
  misc_feature 1..22: note = HBV-targeting guide sequence portion
  source 1..22: mol_type = other RNA
acaggagggatacatagaggtt

SEQ ID NO: 13155 - RNA, 22 nt, synthetic construct
  misc_feature 1..22: note = HBV-targeting guide sequence portion
  source 1..22: mol_type = other RNA
acaggaggttggtgagtgattg

SEQ ID NO: 13156 - RNA, 22 nt, synthetic construct
  misc_feature 1..22: note = HBV-targeting guide sequence portion
  source 1..22: mol_type = other RNA
acaggcctattgattggaaagt

SEQ ID NO: 13157 - RNA, 22 nt, synthetic construct
  misc_feature 1..22: note = HBV-targeting guide sequence portion
  source 1..22: mol_type = other RNA
acaggcctctcactctgggatc

SEQ ID NO: 13158 - RNA, 22 nt, synthetic construct
  misc_feature 1..22: note = HBV-targeting guide sequence portion
  source 1..22: mol_type = other RNA
acaggcggggttttccttgttg

SEQ ID NO: 13159 - RNA, 22 nt, synthetic construct
  misc_feature 1..22: note = HBV-targeting guide sequence portion
  source 1..22: mol_type = other RNA
acagggccccaagcggcctcga

SEQ ID NO: 13160 - RNA, 22 nt, synthetic construct
  misc_feature 1..22: note = HBV-targeting guide sequence portion
  source 1..22: mol_type = other RNA
acagggtttactgttcctgaac

SEQ ID NO: 13161 - RNA, 22 nt, synthetic construct
  misc_feature 1..22: note = HBV-targeting guide sequence portion
  source 1..22: mol_type = other RNA
acaggtacagtagaagaataaa

SEQ ID NO: 13162 - RNA, 22 nt, synthetic construct
  misc_feature 1..22: note = HBV-targeting guide sequence portion
  source 1..22: mol_type = other RNA
acaggtgcagtttccatccgaa

SEQ ID NO: 13163 - RNA, 22 nt, synthetic construct
  misc_feature 1..22: note = HBV-targeting guide sequence portion
  source 1..22: mol_type = other RNA
acagtaaaccctgttccgacta

SEQ ID NO: 13164 - RNA, 22 nt, synthetic construct
  misc_feature 1..22: note = HBV-targeting guide sequence portion
  source 1..22: mol_type = other RNA
acagtagaagaataaagccccg

SEQ ID NO: 13165 - RNA, 22 nt, synthetic construct
  misc_feature 1..22: note = HBV-targeting guide sequence portion
  source 1..22: mol_type = other RNA
acagtagctccaaattctttat

SEQ ID NO: 13166 - RNA, 22 nt, synthetic construct
  misc_feature 1..22: note = HBV-targeting guide sequence portion
  source 1..22: mol_type = other RNA
acagtaggacatgaacaagaga

SEQ ID NO: 13167 - RNA, 22 nt, synthetic construct
  misc_feature 1..22: note = HBV-targeting guide sequence portion
  source 1..22: mol_type = other RNA
acagtctttgaagtatgcctca

SEQ ID NO: 13168 - RNA, 22 nt, synthetic construct
  misc_feature 1..22: note = HBV-targeting guide sequence portion
  source 1..22: mol_type = other RNA
acagtgggggaaagccctacga

SEQ ID NO: 13169 - RNA, 22 nt, synthetic construct
  misc_feature 1..22: note = HBV-targeting guide sequence portion
  source 1..22: mol_type = other RNA
acagttaatgagaaaagacggt

SEQ ID NO: 13170 - RNA, 22 nt, synthetic construct
  misc_feature 1..22: note = HBV-targeting guide sequence portion
  source 1..22: mol_type = other RNA
acagtttgtaggcccgcttaca

SEQ ID NO: 13171 - RNA, 22 nt, synthetic construct
  misc_feature 1..22: note = HBV-targeting guide sequence portion
  source 1..22: mol_type = other RNA
acataactgactactaggtccc

SEQ ID NO: 13172 - RNA, 22 nt, synthetic construct
  misc_feature 1..22: note = HBV-targeting guide sequence portion
  source 1..22: mol_type = other RNA
acataagaggactcttggactc

SEQ ID NO: 13173 - RNA, 22 nt, synthetic construct
  misc_feature 1..22: note = HBV-targeting guide sequence portion
  source 1..22: mol_type = other RNA
acataccttgatagtccagaag

SEQ ID NO: 13174 - RNA, 22 nt, synthetic construct
  misc_feature 1..22: note = HBV-targeting guide sequence portion
  source 1..22: mol_type = other RNA
acatagaggttccttgagcagg

SEQ ID NO: 13175 - RNA, 22 nt, synthetic construct
  misc_feature 1..22: note = HBV-targeting guide sequence portion
  source 1..22: mol_type = other RNA
acatagcccatgaaattaagag

SEQ ID NO: 13176 - RNA, 22 nt, synthetic construct
  misc_feature 1..22: note = HBV-targeting guide sequence portion
  source 1..22: mol_type = other RNA
acatagcgcctcattctgtggg

SEQ ID NO: 13177 - RNA, 22 nt, synthetic construct
  misc_feature 1..22: note = HBV-targeting guide sequence portion
  source 1..22: mol_type = other RNA
acatatcgtcaatcttctcgag

SEQ ID NO: 13178 - RNA, 22 nt, synthetic construct
  misc_feature 1..22: note = HBV-targeting guide sequence portion
  source 1..22: mol_type = other RNA
acatcacatcaggattcctagg

SEQ ID NO: 13179 - RNA, 22 nt, synthetic construct
  misc_feature 1..22: note = HBV-targeting guide sequence portion
  source 1..22: mol_type = other RNA
acatcaggattcctaggacccc

SEQ ID NO: 13180 - RNA, 22 nt, synthetic construct
  misc_feature 1..22: note = HBV-targeting guide sequence portion
  source 1..22: mol_type = other RNA
acatcatacacaaaatcaaaga

SEQ ID NO: 13181 - RNA, 22 nt, synthetic construct
  misc_feature 1..22: note = HBV-targeting guide sequence portion
  source 1..22: mol_type = other RNA
acatcatccatataactgaaag

SEQ ID NO: 13182 - RNA, 22 nt, synthetic construct
  misc_feature 1..22: note = HBV-targeting guide sequence portion
  source 1..22: mol_type = other RNA
acatccagcgataaccaggaca

SEQ ID NO: 13183 - RNA, 22 nt, synthetic construct
  misc_feature 1..22: note = HBV-targeting guide sequence portion
  source 1..22: mol_type = other RNA
acatcgttcccatggctgctag

SEQ ID NO: 13184 - RNA, 22 nt, synthetic construct
  misc_feature 1..22: note = HBV-targeting guide sequence portion
  source 1..22: mol_type = other RNA
acatctacaccaagatattatc

SEQ ID NO: 13185 - RNA, 22 nt, synthetic construct
  misc_feature 1..22: note = HBV-targeting guide sequence portion
  source 1..22: mol_type = other RNA
acatctagttaatcattacttc

SEQ ID NO: 13186 - RNA, 22 nt, synthetic construct
  misc_feature 1..22: note = HBV-targeting guide sequence portion
  source 1..22: mol_type = other RNA
acatgaacaagagatgattagg

SEQ ID NO: 13187 - RNA, 22 nt, synthetic construct
  misc_feature 1..22: note = HBV-targeting guide sequence portion
  source 1..22: mol_type = other RNA
acatgcatacaagggcattaaa

SEQ ID NO: 13188 - RNA, 22 nt, synthetic construct
  misc_feature 1..22: note = HBV-targeting guide sequence portion
  source 1..22: mol_type = other RNA
acatggagaacatcacatcagg

SEQ ID NO: 13189 - RNA, 22 nt, synthetic construct
  misc_feature 1..22: note = HBV-targeting guide sequence portion
  source 1..22: mol_type = other RNA
acattctcgggactgacaactc

SEQ ID NO: 13190 - RNA, 22 nt, synthetic construct
  misc_feature 1..22: note = HBV-targeting guide sequence portion
  source 1..22: mol_type = other RNA
acattctttgattttgtgtatg

SEQ ID NO: 13191 - RNA, 22 nt, synthetic construct
  misc_feature 1..22: note = HBV-targeting guide sequence portion
  source 1..22: mol_type = other RNA
acattgacccatataaagaatt

SEQ ID NO: 13192 - RNA, 22 nt, synthetic construct
  misc_feature 1..22: note = HBV-targeting guide sequence portion
  source 1..22: mol_type = other RNA
acattgagatccccgagattga

SEQ ID NO: 13193 - RNA, 22 nt, synthetic construct
  misc_feature 1..22: note = HBV-targeting guide sequence portion
  source 1..22: mol_type = other RNA
acattgcagagagtccaagagt

SEQ ID NO: 13194 - RNA, 22 nt, synthetic construct
  misc_feature 1..22: note = HBV-targeting guide sequence portion
  source 1..22: mol_type = other RNA
acattgtgtaaaaggggcagca

SEQ ID NO: 13195 - RNA, 22 nt, synthetic construct
  misc_feature 1..22: note = HBV-targeting guide sequence portion
  source 1..22: mol_type = other RNA
acatttaaaccctaacaaaaca

SEQ ID NO: 13196 - RNA, 22 nt, synthetic construct
  misc_feature 1..22: note = HBV-targeting guide sequence portion
  source 1..22: mol_type = other RNA
acatttcttgtcttacttttgg

SEQ ID NO: 13197 - RNA, 22 nt, synthetic construct
  misc_feature 1..22: note = HBV-targeting guide sequence portion
  source 1..22: mol_type = other RNA
acattttttgataatatcttgg

SEQ ID NO: 13198 - RNA, 22 nt, synthetic construct
  misc_feature 1..22: note = HBV-targeting guide sequence portion
  source 1..22: mol_type = other RNA
accaaactctgcaagatcccag

SEQ ID NO: 13199 - RNA, 22 nt, synthetic construct
  misc_feature 1..22: note = HBV-targeting guide sequence portion
  source 1..22: mol_type = other RNA
accaaatactctaggaccgttt

SEQ ID NO: 13200 - RNA, 22 nt, synthetic construct
  misc_feature 1..22: note = HBV-targeting guide sequence portion
  source 1..22: mol_type = other RNA
accaaatacttgcccttggata

SEQ ID NO: 13201 - RNA, 22 nt, synthetic construct
  misc_feature 1..22: note = HBV-targeting guide sequence portion
  source 1..22: mol_type = other RNA
accaaatgcccctatcctatca

SEQ ID NO: 13202 - RNA, 22 nt, synthetic construct
  misc_feature 1..22: note = HBV-targeting guide sequence portion
  source 1..22: mol_type = other RNA
accaacaagaagatgaggcata

SEQ ID NO: 13203 - RNA, 22 nt, synthetic construct
  misc_feature 1..22: note = HBV-targeting guide sequence portion
  source 1..22: mol_type = other RNA
accaacctcctgtcctccaact

SEQ ID NO: 13204 - RNA, 22 nt, synthetic construct
  misc_feature 1..22: note = HBV-targeting guide sequence portion
  source 1..22: mol_type = other RNA
accaagatattatcaaaaaatg

SEQ ID NO: 13205 - RNA, 22 nt, synthetic construct
  misc_feature 1..22: note = HBV-targeting guide sequence portion
  source 1..22: mol_type = other RNA
accaagccccaaccagtggggg

SEQ ID NO: 13206 - RNA, 22 nt, synthetic construct
  misc_feature 1..22: note = HBV-targeting guide sequence portion
  source 1..22: mol_type = other RNA
accaatcgccagtcaggacggc

SEQ ID NO: 13207 - RNA, 22 nt, synthetic construct
  misc_feature 1..22: note = HBV-targeting guide sequence portion
  source 1..22: mol_type = other RNA
accaattcttgcccaaggtctt

SEQ ID NO: 13208 - RNA, 22 nt, synthetic construct
  misc_feature 1..22: note = HBV-targeting guide sequence portion
  source 1..22: mol_type = other RNA
accaatttatgcctacagcctc

SEQ ID NO: 13209 - RNA, 22 nt, synthetic construct
  misc_feature 1..22: note = HBV-targeting guide sequence portion
  source 1..22: mol_type = other RNA
accaattttcttttgtctttgg

SEQ ID NO: 13210 - RNA, 22 nt, synthetic construct
  misc_feature 1..22: note = HBV-targeting guide sequence portion
  source 1..22: mol_type = other RNA
accacaatagttgtctgaactt

SEQ ID NO: 13211 - RNA, 22 nt, synthetic construct
  misc_feature 1..22: note = HBV-targeting guide sequence portion
  source 1..22: mol_type = other RNA
accacatcatccatataactga

SEQ ID NO: 13212 - RNA, 22 nt, synthetic construct
  misc_feature 1..22: note = HBV-targeting guide sequence portion
  source 1..22: mol_type = other RNA
accacattgtgtaaaaggggca

SEQ ID NO: 13213 - RNA, 22 nt, synthetic construct
  misc_feature 1..22: note = HBV-targeting guide sequence portion
  source 1..22: mol_type = other RNA
accaccaaatgcccctatccta

SEQ ID NO: 13214 - RNA, 22 nt, synthetic construct
  misc_feature 1..22: note = HBV-targeting guide sequence portion
  source 1..22: mol_type = other RNA
accaccagcacgggaccctgca

SEQ ID NO: 13215 - RNA, 22 nt, synthetic construct
  misc_feature 1..22: note = HBV-targeting guide sequence portion
  source 1..22: mol_type = other RNA
accaccagttggacccagcctt

SEQ ID NO: 13216 - RNA, 22 nt, synthetic construct
  misc_feature 1..22: note = HBV-targeting guide sequence portion
  source 1..22: mol_type = other RNA
accaccgtgaacgcccaccaat

SEQ ID NO: 13217 - RNA, 22 nt, synthetic construct
  misc_feature 1..22: note = HBV-targeting guide sequence portion
  source 1..22: mol_type = other RNA
accacgagtctagactctgcgg

SEQ ID NO: 13218 - RNA, 22 nt, synthetic construct
  misc_feature 1..22: note = HBV-targeting guide sequence portion
  source 1..22: mol_type = other RNA
accacggggcgcacctctcttt

SEQ ID NO: 13219 - RNA, 22 nt, synthetic construct
  misc_feature 1..22: note = HBV-targeting guide sequence portion
  source 1..22: mol_type = other RNA
accactgaacaaatggcactag

SEQ ID NO: 13220 - RNA, 22 nt, synthetic construct
  misc_feature 1..22: note = HBV-targeting guide sequence portion
  source 1..22: mol_type = other RNA
accagcaatcctctgggattct

SEQ ID NO: 13221 - RNA, 22 nt, synthetic construct
  misc_feature 1..22: note = HBV-targeting guide sequence portion
  source 1..22: mol_type = other RNA
accagcaccatgcaactttttc

SEQ ID NO: 13222 - RNA, 22 nt, synthetic construct
  misc_feature 1..22: note = HBV-targeting guide sequence portion
  source 1..22: mol_type = other RNA
accagcacgggaccctgcagaa

SEQ ID NO: 13223 - RNA, 22 nt, synthetic construct
  misc_feature 1..22: note = HBV-targeting guide sequence portion
  source 1..22: mol_type = other RNA
accagcagggagatacaggcct

SEQ ID NO: 13224 - RNA, 22 nt, synthetic construct
  misc_feature 1..22: note = HBV-targeting guide sequence portion
  source 1..22: mol_type = other RNA
accaggacaagttggaggacag

SEQ ID NO: 13225 - RNA, 22 nt, synthetic construct
  misc_feature 1..22: note = HBV-targeting guide sequence portion
  source 1..22: mol_type = other RNA
accagtgggggttgcatcagca

SEQ ID NO: 13226 - RNA, 22 nt, synthetic construct
  misc_feature 1..22: note = HBV-targeting guide sequence portion
  source 1..22: mol_type = other RNA
accagttggacccagccttcag

SEQ ID NO: 13227 - RNA, 22 nt, synthetic construct
  misc_feature 1..22: note = HBV-targeting guide sequence portion
  source 1..22: mol_type = other RNA
accatactgcactcaggcaagc

SEQ ID NO: 13228 - RNA, 22 nt, synthetic construct
  misc_feature 1..22: note = HBV-targeting guide sequence portion
  source 1..22: mol_type = other RNA
accatattcttgggaacaagag

SEQ ID NO: 13229 - RNA, 22 nt, synthetic construct
  misc_feature 1..22: note = HBV-targeting guide sequence portion
  source 1..22: mol_type = other RNA
accatgcaactttttcacctct

SEQ ID NO: 13230 - RNA, 22 nt, synthetic construct
  misc_feature 1..22: note = HBV-targeting guide sequence portion
  source 1..22: mol_type = other RNA
acccaaagacaaaagaaaattg

SEQ ID NO: 13231 - RNA, 22 nt, synthetic construct
  misc_feature 1..22: note = HBV-targeting guide sequence portion
  source 1..22: mol_type = other RNA
acccaaggcacagcttggaggc

SEQ ID NO: 13232 - RNA, 22 nt, synthetic construct
  misc_feature 1..22: note = HBV-targeting guide sequence portion
  source 1..22: mol_type = other RNA
acccacaattcgttgacacact

SEQ ID NO: 13233 - RNA, 22 nt, synthetic construct
  misc_feature 1..22: note = HBV-targeting guide sequence portion
  source 1..22: mol_type = other RNA
acccacagaatgaggcgctatg

SEQ ID NO: 13234 - RNA, 22 nt, synthetic construct
  misc_feature 1..22: note = HBV-targeting guide sequence portion
  source 1..22: mol_type = other RNA
acccacccaggtagctagagtc

SEQ ID NO: 13235 - RNA, 22 nt, synthetic construct
  misc_feature 1..22: note = HBV-targeting guide sequence portion
  source 1..22: mol_type = other RNA
acccagaagacccacaattcgt

SEQ ID NO: 13236 - RNA, 22 nt, synthetic construct
  misc_feature 1..22: note = HBV-targeting guide sequence portion
  source 1..22: mol_type = other RNA
acccagccttcagagcaaactc

SEQ ID NO: 13237 - RNA, 22 nt, synthetic construct
  misc_feature 1..22: note = HBV-targeting guide sequence portion
  source 1..22: mol_type = other RNA
acccaggtagctagagtcatta

SEQ ID NO: 13238 - RNA, 22 nt, synthetic construct
  misc_feature 1..22: note = HBV-targeting guide sequence portion
  source 1..22: mol_type = other RNA
acccatataaagaatttggagc

SEQ ID NO: 13239 - RNA, 22 nt, synthetic construct
  misc_feature 1..22: note = HBV-targeting guide sequence portion
  source 1..22: mol_type = other RNA
acccatctcgaggccgcttggg

SEQ ID NO: 13240 - RNA, 22 nt, synthetic construct
  misc_feature 1..22: note = HBV-targeting guide sequence portion
  source 1..22: mol_type = other RNA
accccaaaaggcctccgtgcgg

SEQ ID NO: 13241 - RNA, 22 nt, synthetic construct
  misc_feature 1..22: note = HBV-targeting guide sequence portion
  source 1..22: mol_type = other RNA
accccaccgcacggaggccttt

SEQ ID NO: 13242 - RNA, 22 nt, synthetic construct
  misc_feature 1..22: note = HBV-targeting guide sequence portion
  source 1..22: mol_type = other RNA
accccatctctttgttttgtta

SEQ ID NO: 13243 - RNA, 22 nt, synthetic construct
  misc_feature 1..22: note = HBV-targeting guide sequence portion
  source 1..22: mol_type = other RNA
acccccactggttggggcttgg

SEQ ID NO: 13244 - RNA, 22 nt, synthetic construct
  misc_feature 1..22: note = HBV-targeting guide sequence portion
  source 1..22: mol_type = other RNA
accccgcctgtaacacgagcag

SEQ ID NO: 13245 - RNA, 22 nt, synthetic construct
  misc_feature 1..22: note = HBV-targeting guide sequence portion
  source 1..22: mol_type = other RNA
accccgctgtctccacctctga

SEQ ID NO: 13246 - RNA, 22 nt, synthetic construct
  misc_feature 1..22: note = HBV-targeting guide sequence portion
  source 1..22: mol_type = other RNA
accccgttgccaggcaacggcc

SEQ ID NO: 13247 - RNA, 22 nt, synthetic construct
  misc_feature 1..22: note = HBV-targeting guide sequence portion
  source 1..22: mol_type = other RNA
acccctgctcgtgttacaggcg

SEQ ID NO: 13248 - RNA, 22 nt, synthetic construct
  misc_feature 1..22: note = HBV-targeting guide sequence portion
  source 1..22: mol_type = other RNA
acccgccttccatagagtgtgt

SEQ ID NO: 13249 - RNA, 22 nt, synthetic construct
  misc_feature 1..22: note = HBV-targeting guide sequence portion
  source 1..22: mol_type = other RNA
accctaacaaaacaaagagatg

SEQ ID NO: 13250 - RNA, 22 nt, synthetic construct
  misc_feature 1..22: note = HBV-targeting guide sequence portion
  source 1..22: mol_type = other RNA
accctagcccgaatgctccagc

SEQ ID NO: 13251 - RNA, 22 nt, synthetic construct
  misc_feature 1..22: note = HBV-targeting guide sequence portion
  source 1..22: mol_type = other RNA
accctcattggaaaacaccctc

SEQ ID NO: 13252 - RNA, 22 nt, synthetic construct
  misc_feature 1..22: note = HBV-targeting guide sequence portion
  source 1..22: mol_type = other RNA
accctcttttcctaatatacat

SEQ ID NO: 13253 - RNA, 22 nt, synthetic construct
  misc_feature 1..22: note = HBV-targeting guide sequence portion
  source 1..22: mol_type = other RNA
accctgcagaacctgcacgact

SEQ ID NO: 13254 - RNA, 22 nt, synthetic construct
  misc_feature 1..22: note = HBV-targeting guide sequence portion
  source 1..22: mol_type = other RNA
accctgcgctgaacatggagaa

SEQ ID NO: 13255 - RNA, 22 nt, synthetic construct
  misc_feature 1..22: note = HBV-targeting guide sequence portion
  source 1..22: mol_type = other RNA
accctgttccgactactgcctc

SEQ ID NO: 13256 - RNA, 22 nt, synthetic construct
  misc_feature 1..22: note = HBV-targeting guide sequence portion
  source 1..22: mol_type = other RNA
acccttatccaagggcaagtat

SEQ ID NO: 13257 - RNA, 22 nt, synthetic construct
  misc_feature 1..22: note = HBV-targeting guide sequence portion
  source 1..22: mol_type = other RNA
accgaccacggggcgcacctct

SEQ ID NO: 13258 - RNA, 22 nt, synthetic construct
  misc_feature 1..22: note = HBV-targeting guide sequence portion
  source 1..22: mol_type = other RNA
accgaccttgaggcatacttca

SEQ ID NO: 13259 - RNA, 22 nt, synthetic construct
  misc_feature 1..22: note = HBV-targeting guide sequence portion
  source 1..22: mol_type = other RNA
accgcacggaggccttttgggg

SEQ ID NO: 13260 - RNA, 22 nt, synthetic construct
  misc_feature 1..22: note = HBV-targeting guide sequence portion
  source 1..22: mol_type = other RNA
accgcagagtctagactcgtgg

SEQ ID NO: 13261 - RNA, 22 nt, synthetic construct
  misc_feature 1..22: note = HBV-targeting guide sequence portion
  source 1..22: mol_type = other RNA
accgccgcagctctgtatcggg

SEQ ID NO: 13262 - RNA, 22 nt, synthetic construct
  misc_feature 1..22: note = HBV-targeting guide sequence portion
  source 1..22: mol_type = other RNA
accgctgttaccaattttcttt

SEQ ID NO: 13263 - RNA, 22 nt, synthetic construct
  misc_feature 1..22: note = HBV-targeting guide sequence portion
  source 1..22: mol_type = other RNA
accggctgcgagcaaaacaagc

SEQ ID NO: 13264 - RNA, 22 nt, synthetic construct
  misc_feature 1..22: note = HBV-targeting guide sequence portion
  source 1..22: mol_type = other RNA
accgggagttttctgaaacatt

SEQ ID NO: 13265 - RNA, 22 nt, synthetic construct
  misc_feature 1..22: note = HBV-targeting guide sequence portion
  source 1..22: mol_type = other RNA
accgtcttttctcattaactgt

SEQ ID NO: 13266 - RNA, 22 nt, synthetic construct
  misc_feature 1..22: note = HBV-targeting guide sequence portion
  source 1..22: mol_type = other RNA
accgtgaacgcccaccaattct

SEQ ID NO: 13267 - RNA, 22 nt, synthetic construct
  misc_feature 1..22: note = HBV-targeting guide sequence portion
  source 1..22: mol_type = other RNA
accgtgtgcacttcgcttcacc

SEQ ID NO: 13268 - RNA, 22 nt, synthetic construct
  misc_feature 1..22: note = HBV-targeting guide sequence portion
  source 1..22: mol_type = other RNA
accgtgtgtcttggccaaaatt

SEQ ID NO: 13269 - RNA, 22 nt, synthetic construct
  misc_feature 1..22: note = HBV-targeting guide sequence portion
  source 1..22: mol_type = other RNA
accgtttctcttccaaaagtaa

SEQ ID NO: 13270 - RNA, 22 nt, synthetic construct
  misc_feature 1..22: note = HBV-targeting guide sequence portion
  source 1..22: mol_type = other RNA
acctagcaggcataatcaattt

SEQ ID NO: 13271 - RNA, 22 nt, synthetic construct
  misc_feature 1..22: note = HBV-targeting guide sequence portion
  source 1..22: mol_type = other RNA
acctagtagtcagttatgtcaa

SEQ ID NO: 13272 - RNA, 22 nt, synthetic construct
  misc_feature 1..22: note = HBV-targeting guide sequence portion
  source 1..22: mol_type = other RNA
acctcaccatactgcactcagg

SEQ ID NO: 13273 - RNA, 22 nt, synthetic construct
  misc_feature 1..22: note = HBV-targeting guide sequence portion
  source 1..22: mol_type = other RNA
acctccaatcactcaccaacct

SEQ ID NO: 13274 - RNA, 22 nt, synthetic construct
  misc_feature 1..22: note = HBV-targeting guide sequence portion
  source 1..22: mol_type = other RNA
acctcctgtcctccaacttgtc

SEQ ID NO: 13275 - RNA, 22 nt, synthetic construct
  misc_feature 1..22: note = HBV-targeting guide sequence portion
  source 1..22: mol_type = other RNA
acctctatgtatccctcctgtt

SEQ ID NO: 13276 - RNA, 22 nt, synthetic construct
  misc_feature 1..22: note = HBV-targeting guide sequence portion
  source 1..22: mol_type = other RNA
acctctctttacgcggactccc

SEQ ID NO: 13277 - RNA, 22 nt, synthetic construct
  misc_feature 1..22: note = HBV-targeting guide sequence portion
  source 1..22: mol_type = other RNA
acctctgagaaacactcatcct

SEQ ID NO: 13278 - RNA, 22 nt, synthetic construct
  misc_feature 1..22: note = HBV-targeting guide sequence portion
  source 1..22: mol_type = other RNA
acctctgcacgtcgcatggaga

SEQ ID NO: 13279 - RNA, 22 nt, synthetic construct
  misc_feature 1..22: note = HBV-targeting guide sequence portion
  source 1..22: mol_type = other RNA
acctctgcctaatcatctcttg

SEQ ID NO: 13280 - RNA, 22 nt, synthetic construct
  misc_feature 1..22: note = HBV-targeting guide sequence portion
  source 1..22: mol_type = other RNA
acctgaacctttaccccgttgc

SEQ ID NO: 13281 - RNA, 22 nt, synthetic construct
  misc_feature 1..22: note = HBV-targeting guide sequence portion
  source 1..22: mol_type = other RNA
acctgcacgactcctgctcaag

SEQ ID NO: 13282 - RNA, 22 nt, synthetic construct
  misc_feature 1..22: note = HBV-targeting guide sequence portion
  source 1..22: mol_type = other RNA
acctgcctcgtcgtctaacaac

SEQ ID NO: 13283 - RNA, 22 nt, synthetic construct
  misc_feature 1..22: note = HBV-targeting guide sequence portion
  source 1..22: mol_type = other RNA
acctggccgttgcctggcaacg

SEQ ID NO: 13284 - RNA, 22 nt, synthetic construct
  misc_feature 1..22: note = HBV-targeting guide sequence portion
  source 1..22: mol_type = other RNA
acctgggtgggtactaatttag

SEQ ID NO: 13285 - RNA, 22 nt, synthetic construct
  misc_feature 1..22: note = HBV-targeting guide sequence portion
  source 1..22: mol_type = other RNA
acctgtattcccatcccatcat

SEQ ID NO: 13286 - RNA, 22 nt, synthetic construct
  misc_feature 1..22: note = HBV-targeting guide sequence portion
  source 1..22: mol_type = other RNA
acctgtctttaaccctcattgg

SEQ ID NO: 13287 - RNA, 22 nt, synthetic construct
  misc_feature 1..22: note = HBV-targeting guide sequence portion
  source 1..22: mol_type = other RNA
accttatgagtccaagggatac

SEQ ID NO: 13288 - RNA, 22 nt, synthetic construct
  misc_feature 1..22: note = HBV-targeting guide sequence portion
  source 1..22: mol_type = other RNA
accttattatccagaacatcta

SEQ ID NO: 13289 - RNA, 22 nt, synthetic construct
  misc_feature 1..22: note = HBV-targeting guide sequence portion
  source 1..22: mol_type = other RNA
accttccaccaaactctgcaag

SEQ ID NO: 13290 - RNA, 22 nt, synthetic construct
  misc_feature 1..22: note = HBV-targeting guide sequence portion
  source 1..22: mol_type = other RNA
accttcggatggaaactgcacc

SEQ ID NO: 13291 - RNA, 22 nt, synthetic construct
  misc_feature 1..22: note = HBV-targeting guide sequence portion
  source 1..22: mol_type = other RNA
accttgaggcatacttcaaaga

SEQ ID NO: 13292 - RNA, 22 nt, synthetic construct
  misc_feature 1..22: note = HBV-targeting guide sequence portion
  source 1..22: mol_type = other RNA
accttgatagtccagaagaacc

SEQ ID NO: 13293 - RNA, 22 nt, synthetic construct
  misc_feature 1..22: note = HBV-targeting guide sequence portion
  source 1..22: mol_type = other RNA
accttgccagcaaatccgcctc

SEQ ID NO: 13294 - RNA, 22 nt, synthetic construct
  misc_feature 1..22: note = HBV-targeting guide sequence portion
  source 1..22: mol_type = other RNA
accttgggcaagaattggtggg

SEQ ID NO: 13295 - RNA, 22 nt, synthetic construct
  misc_feature 1..22: note = HBV-targeting guide sequence portion
  source 1..22: mol_type = other RNA
accttgttggcgtctggccagg

SEQ ID NO: 13296 - RNA, 22 nt, synthetic construct
  misc_feature 1..22: note = HBV-targeting guide sequence portion
  source 1..22: mol_type = other RNA
acctttaccccgttgccaggca

SEQ ID NO: 13297 - RNA, 22 nt, synthetic construct
  misc_feature 1..22: note = HBV-targeting guide sequence portion
  source 1..22: mol_type = other RNA
acctttccggctcctctgccga

SEQ ID NO: 13298 - RNA, 22 nt, synthetic construct
  misc_feature 1..22: note = HBV-targeting guide sequence portion
  source 1..22: mol_type = other RNA
acgaaccactgaacaaatggca

SEQ ID NO: 13299 - RNA, 22 nt, synthetic construct
  misc_feature 1..22: note = HBV-targeting guide sequence portion
  source 1..22: mol_type = other RNA
acgaagatctcaatcgccgcgt

SEQ ID NO: 13300 - RNA, 22 nt, synthetic construct
  misc_feature 1..22: note = HBV-targeting guide sequence portion
  source 1..22: mol_type = other RNA
acgaattgtgggtcttctgggt

SEQ ID NO: 13301 - RNA, 22 nt, synthetic construct
  misc_feature 1..22: note = HBV-targeting guide sequence portion
  source 1..22: mol_type = other RNA
acgacagggccccaagcggcct

SEQ ID NO: 13302 - RNA, 22 nt, synthetic construct
  misc_feature 1..22: note = HBV-targeting guide sequence portion
  source 1..22: mol_type = other RNA
acgacccatctcgaggccgctt

SEQ ID NO: 13303 - RNA, 22 nt, synthetic construct
  misc_feature 1..22: note = HBV-targeting guide sequence portion
  source 1..22: mol_type = other RNA
acgaccgaccttgaggcatact

SEQ ID NO: 13304 - RNA, 22 nt, synthetic construct
  misc_feature 1..22: note = HBV-targeting guide sequence portion
  source 1..22: mol_type = other RNA
acgacgaggcaggtcccctaga

SEQ ID NO: 13305 - RNA, 22 nt, synthetic construct
  misc_feature 1..22: note = HBV-targeting guide sequence portion
  source 1..22: mol_type = other RNA
acgactcctgctcaaggaacct

SEQ ID NO: 13306 - RNA, 22 nt, synthetic construct
  misc_feature 1..22: note = HBV-targeting guide sequence portion
  source 1..22: mol_type = other RNA
acgagagtaactccacagtagc

SEQ ID NO: 13307 - RNA, 22 nt, synthetic construct
  misc_feature 1..22: note = HBV-targeting guide sequence portion
  source 1..22: mol_type = other RNA
acgagatcttctagataccgcc

SEQ ID NO: 13308 - RNA, 22 nt, synthetic construct
  misc_feature 1..22: note = HBV-targeting guide sequence portion
  source 1..22: mol_type = other RNA
acgagcaggggtcctaggaatc

SEQ ID NO: 13309 - RNA, 22 nt, synthetic construct
  misc_feature 1..22: note = HBV-targeting guide sequence portion
  source 1..22: mol_type = other RNA
acgaggcaggtcccctagaaga

SEQ ID NO: 13310 - RNA, 22 nt, synthetic construct
  misc_feature 1..22: note = HBV-targeting guide sequence portion
  source 1..22: mol_type = other RNA
acgagtctagactctgcggtat

SEQ ID NO: 13311 - RNA, 22 nt, synthetic construct
  misc_feature 1..22: note = HBV-targeting guide sequence portion
  source 1..22: mol_type = other RNA
acgatatgtgagaggcagtagt

SEQ ID NO: 13312 - RNA, 22 nt, synthetic construct
  misc_feature 1..22: note = HBV-targeting guide sequence portion
  source 1..22: mol_type = other RNA
acgatgtatatttgcgggagag

SEQ ID NO: 13313 - RNA, 22 nt, synthetic construct
  misc_feature 1..22: note = HBV-targeting guide sequence portion
  source 1..22: mol_type = other RNA
acgcatgcgctgatggcctatg

SEQ ID NO: 13314 - RNA, 22 nt, synthetic construct
  misc_feature 1..22: note = HBV-targeting guide sequence portion
  source 1..22: mol_type = other RNA
acgccaacaaggtaggagctgg

SEQ ID NO: 13315 - RNA, 22 nt, synthetic construct
  misc_feature 1..22: note = HBV-targeting guide sequence portion
  source 1..22: mol_type = other RNA
acgcccaccaattcttgcccaa

SEQ ID NO: 13316 - RNA, 22 nt, synthetic construct
  misc_feature 1..22: note = HBV-targeting guide sequence portion
  source 1..22: mol_type = other RNA
acgccgcagacacatccagcga

SEQ ID NO: 13317 - RNA, 22 nt, synthetic construct
  misc_feature 1..22: note = HBV-targeting guide sequence portion
  source 1..22: mol_type = other RNA
acgcggactccccgtctgtgcc

SEQ ID NO: 13318 - RNA, 22 nt, synthetic construct
  misc_feature 1..22: note = HBV-targeting guide sequence portion
  source 1..22: mol_type = other RNA
acgcggcgattgagatcttcgt

SEQ ID NO: 13319 - RNA, 22 nt, synthetic construct
  misc_feature 1..22: note = HBV-targeting guide sequence portion
  source 1..22: mol_type = other RNA
acggaaggaaagaagtcagaag

SEQ ID NO: 13320 - RNA, 22 nt, synthetic construct
  misc_feature 1..22: note = HBV-targeting guide sequence portion
  source 1..22: mol_type = other RNA
acggaggccttttggggtggag

SEQ ID NO: 13321 - RNA, 22 nt, synthetic construct
  misc_feature 1..22: note = HBV-targeting guide sequence portion
  source 1..22: mol_type = other RNA
acggcagcctaccccgctgtct

SEQ ID NO: 13322 - RNA, 22 nt, synthetic construct
  misc_feature 1..22: note = HBV-targeting guide sequence portion
  source 1..22: mol_type = other RNA
acggcaggcagagaagaggacg

SEQ ID NO: 13323 - RNA, 22 nt, synthetic construct
  misc_feature 1..22: note = HBV-targeting guide sequence portion
  source 1..22: mol_type = other RNA
acggccaggtctgtgccaagtg

SEQ ID NO: 13324 - RNA, 22 nt, synthetic construct
  misc_feature 1..22: note = HBV-targeting guide sequence portion
  source 1..22: mol_type = other RNA
acgggaaacataccttgatagt

SEQ ID NO: 13325 - RNA, 22 nt, synthetic construct
  misc_feature 1..22: note = HBV-targeting guide sequence portion
  source 1..22: mol_type = other RNA
acgggaccctgcagaacctgca

SEQ ID NO: 13326 - RNA, 22 nt, synthetic construct
  misc_feature 1..22: note = HBV-targeting guide sequence portion
  source 1..22: mol_type = other RNA
acgggacgtaaacaaaggacgt

SEQ ID NO: 13327 - RNA, 22 nt, synthetic construct
  misc_feature 1..22: note = HBV-targeting guide sequence portion
  source 1..22: mol_type = other RNA
acgggctgaggcccactcccat

SEQ ID NO: 13328 - RNA, 22 nt, synthetic construct
  misc_feature 1..22: note = HBV-targeting guide sequence portion
  source 1..22: mol_type = other RNA
acggggagtccgcgtaaagaga

SEQ ID NO: 13329 - RNA, 22 nt, synthetic construct
  misc_feature 1..22: note = HBV-targeting guide sequence portion
  source 1..22: mol_type = other RNA
acggggcgcacctctctttacg

SEQ ID NO: 13330 - RNA, 22 nt, synthetic construct
  misc_feature 1..22: note = HBV-targeting guide sequence portion
  source 1..22: mol_type = other RNA
acggggctttattcttctactg

SEQ ID NO: 13331 - RNA, 22 nt, synthetic construct
  misc_feature 1..22: note = HBV-targeting guide sequence portion
  source 1..22: mol_type = other RNA
acggggtaaaggttcaggtatt

SEQ ID NO: 13332 - RNA, 22 nt, synthetic construct
  misc_feature 1..22: note = HBV-targeting guide sequence portion
  source 1..22: mol_type = other RNA
acggtagttccccctagaaaat

SEQ ID NO: 13333 - RNA, 22 nt, synthetic construct
  misc_feature 1..22: note = HBV-targeting guide sequence portion
  source 1..22: mol_type = other RNA
acggtccggcagatgagaaggc

SEQ ID NO: 13334 - RNA, 22 nt, synthetic construct
  misc_feature 1..22: note = HBV-targeting guide sequence portion
  source 1..22: mol_type = other RNA
acggtcctagagtatttggtgt

SEQ ID NO: 13335 - RNA, 22 nt, synthetic construct
  misc_feature 1..22: note = HBV-targeting guide sequence portion
  source 1..22: mol_type = other RNA
acggtggtctccatgcgacgtg

SEQ ID NO: 13336 - RNA, 22 nt, synthetic construct
  misc_feature 1..22: note = HBV-targeting guide sequence portion
  source 1..22: mol_type = other RNA
acggttgaaattgattatgcct

SEQ ID NO: 13337 - RNA, 22 nt, synthetic construct
  misc_feature 1..22: note = HBV-targeting guide sequence portion
  source 1..22: mol_type = other RNA
acgtaaacaaaggacgtcccgc

SEQ ID NO: 13338 - RNA, 22 nt, synthetic construct
  misc_feature 1..22: note = HBV-targeting guide sequence portion
  source 1..22: mol_type = other RNA
acgtcccgcgcaggatccagtt

SEQ ID NO: 13339 - RNA, 22 nt, synthetic construct
  misc_feature 1..22: note = HBV-targeting guide sequence portion
  source 1..22: mol_type = other RNA
acgtcccgtcggcgctgaatcc

SEQ ID NO: 13340 - RNA, 22 nt, synthetic construct
  misc_feature 1..22: note = HBV-targeting guide sequence portion
  source 1..22: mol_type = other RNA
acgtcctttgtttacgtcccgt

SEQ ID NO: 13341 - RNA, 22 nt, synthetic construct
  misc_feature 1..22: note = HBV-targeting guide sequence portion
  source 1..22: mol_type = other RNA
acgtcgcatggagaccaccgtg

SEQ ID NO: 13342 - RNA, 22 nt, synthetic construct
  misc_feature 1..22: note = HBV-targeting guide sequence portion
  source 1..22: mol_type = other RNA
acgtgcagaggtgaagcgaagt

SEQ ID NO: 13343 - RNA, 22 nt, synthetic construct
  misc_feature 1..22: note = HBV-targeting guide sequence portion
  source 1..22: mol_type = other RNA
actaacattgagatccccgaga

SEQ ID NO: 13344 - RNA, 22 nt, synthetic construct
  misc_feature 1..22: note = HBV-targeting guide sequence portion
  source 1..22: mol_type = other RNA
actaatgactctagctacctgg

SEQ ID NO: 13345 - RNA, 22 nt, synthetic construct
  misc_feature 1..22: note = HBV-targeting guide sequence portion
  source 1..22: mol_type = other RNA
actaatttagaagatcaagcat

SEQ ID NO: 13346 - RNA, 22 nt, synthetic construct
  misc_feature 1..22: note = HBV-targeting guide sequence portion
  source 1..22: mol_type = other RNA
actaccgtgtgtcttggccaaa

SEQ ID NO: 13347 - RNA, 22 nt, synthetic construct
  misc_feature 1..22: note = HBV-targeting guide sequence portion
  source 1..22: mol_type = other RNA
actactaggtccctagatgctt

SEQ ID NO: 13348 - RNA, 22 nt, synthetic construct
  misc_feature 1..22: note = HBV-targeting guide sequence portion
  source 1..22: mol_type = other RNA
actactgcctctcacatatcgt

SEQ ID NO: 13349 - RNA, 22 nt, synthetic construct
  misc_feature 1..22: note = HBV-targeting guide sequence portion
  source 1..22: mol_type = other RNA
actagacactatttacacactc

SEQ ID NO: 13350 - RNA, 22 nt, synthetic construct
  misc_feature 1..22: note = HBV-targeting guide sequence portion
  source 1..22: mol_type = other RNA
actagatgttctggataataag

SEQ ID NO: 13351 - RNA, 22 nt, synthetic construct
  misc_feature 1..22: note = HBV-targeting guide sequence portion
  source 1..22: mol_type = other RNA
actaggaggctgtaggcataaa

SEQ ID NO: 13352 - RNA, 22 nt, synthetic construct
  misc_feature 1..22: note = HBV-targeting guide sequence portion
  source 1..22: mol_type = other RNA
actaggtccctagatgcttgat

SEQ ID NO: 13353 - RNA, 22 nt, synthetic construct
  misc_feature 1..22: note = HBV-targeting guide sequence portion
  source 1..22: mol_type = other RNA
actagtaaactgagccaagaga

SEQ ID NO: 13354 - RNA, 22 nt, synthetic construct
  misc_feature 1..22: note = HBV-targeting guide sequence portion
  source 1..22: mol_type = other RNA
actagtgccatttgttcagtgg

SEQ ID NO: 13355 - RNA, 22 nt, synthetic construct
  misc_feature 1..22: note = HBV-targeting guide sequence portion
  source 1..22: mol_type = other RNA
actatcaaggtatgtttcccgt

SEQ ID NO: 13356 - RNA, 22 nt, synthetic construct
  misc_feature 1..22: note = HBV-targeting guide sequence portion
  source 1..22: mol_type = other RNA
actattgtggtttcacatttct

SEQ ID NO: 13357 - RNA, 22 nt, synthetic construct
  misc_feature 1..22: note = HBV-targeting guide sequence portion
  source 1..22: mol_type = other RNA
actatttacacactctatggaa

SEQ ID NO: 13358 - RNA, 22 nt, synthetic construct
  misc_feature 1..22: note = HBV-targeting guide sequence portion
  source 1..22: mol_type = other RNA
actcaagatgctgtacagactt

SEQ ID NO: 13359 - RNA, 22 nt, synthetic construct
  misc_feature 1..22: note = HBV-targeting guide sequence portion
  source 1..22: mol_type = other RNA
actcaccaacctcctgtcctcc

SEQ ID NO: 13360 - RNA, 22 nt, synthetic construct
  misc_feature 1..22: note = HBV-targeting guide sequence portion
  source 1..22: mol_type = other RNA
actcaggcaagcaattctttgc

SEQ ID NO: 13361 - RNA, 22 nt, synthetic construct
  misc_feature 1..22: note = HBV-targeting guide sequence portion
  source 1..22: mol_type = other RNA
actcataaggtgggaaatttta

SEQ ID NO: 13362 - RNA, 22 nt, synthetic construct
  misc_feature 1..22: note = HBV-targeting guide sequence portion
  source 1..22: mol_type = other RNA
actcatatgggcctaaagttca

SEQ ID NO: 13363 - RNA, 22 nt, synthetic construct
  misc_feature 1..22: note = HBV-targeting guide sequence portion
  source 1..22: mol_type = other RNA
actccaaaagacaccaaatact

SEQ ID NO: 13364 - RNA, 22 nt, synthetic construct
  misc_feature 1..22: note = HBV-targeting guide sequence portion
  source 1..22: mol_type = other RNA
actccaacaatccagattggga

SEQ ID NO: 13365 - RNA, 22 nt, synthetic construct
  misc_feature 1..22: note = HBV-targeting guide sequence portion
  source 1..22: mol_type = other RNA
actccaaggcatcccgatacag

SEQ ID NO: 13366 - RNA, 22 nt, synthetic construct
  misc_feature 1..22: note = HBV-targeting guide sequence portion
  source 1..22: mol_type = other RNA
actccacaaccttccaccaaac

SEQ ID NO: 13367 - RNA, 22 nt, synthetic construct
  misc_feature 1..22: note = HBV-targeting guide sequence portion
  source 1..22: mol_type = other RNA
actccacagtagctccaaattc

SEQ ID NO: 13368 - RNA, 22 nt, synthetic construct
  misc_feature 1..22: note = HBV-targeting guide sequence portion
  source 1..22: mol_type = other RNA
actcccataggaattttccgaa

SEQ ID NO: 13369 - RNA, 22 nt, synthetic construct
  misc_feature 1..22: note = HBV-targeting guide sequence portion
  source 1..22: mol_type = other RNA
actccccgtctgtgccttctca

SEQ ID NO: 13370 - RNA, 22 nt, synthetic construct
  misc_feature 1..22: note = HBV-targeting guide sequence portion
  source 1..22: mol_type = other RNA
actcccggttaacaggcctatt

SEQ ID NO: 13371 - RNA, 22 nt, synthetic construct
  misc_feature 1..22: note = HBV-targeting guide sequence portion
  source 1..22: mol_type = other RNA
actccctcgcctcgcagacgaa

SEQ ID NO: 13372 - RNA, 22 nt, synthetic construct
  misc_feature 1..22: note = HBV-targeting guide sequence portion
  source 1..22: mol_type = other RNA
actcctagccgcttgttttgct

SEQ ID NO: 13373 - RNA, 22 nt, synthetic construct
  misc_feature 1..22: note = HBV-targeting guide sequence portion
  source 1..22: mol_type = other RNA
actcctccagcttatagaccac

SEQ ID NO: 13374 - RNA, 22 nt, synthetic construct
  misc_feature 1..22: note = HBV-targeting guide sequence portion
  source 1..22: mol_type = other RNA
actcctcccagtctttaaacaa

SEQ ID NO: 13375 - RNA, 22 nt, synthetic construct
  misc_feature 1..22: note = HBV-targeting guide sequence portion
  source 1..22: mol_type = other RNA
actcctgctcaaggaacctcta

SEQ ID NO: 13376 - RNA, 22 nt, synthetic construct
  misc_feature 1..22: note = HBV-targeting guide sequence portion
  source 1..22: mol_type = other RNA
actcgtggtggacttctctcaa

SEQ ID NO: 13377 - RNA, 22 nt, synthetic construct
  misc_feature 1..22: note = HBV-targeting guide sequence portion
  source 1..22: mol_type = other RNA
actctagctacctgggtgggta

SEQ ID NO: 13378 - RNA, 22 nt, synthetic construct
  misc_feature 1..22: note = HBV-targeting guide sequence portion
  source 1..22: mol_type = other RNA
actctaggaccgtttctcttcc

SEQ ID NO: 13379 - RNA, 22 nt, synthetic construct
  misc_feature 1..22: note = HBV-targeting guide sequence portion
  source 1..22: mol_type = other RNA
actctatggaaggcgggtgttt

SEQ ID NO: 13380 - RNA, 22 nt, synthetic construct
  misc_feature 1..22: note = HBV-targeting guide sequence portion
  source 1..22: mol_type = other RNA
actctcgtttttgccttctgac

SEQ ID NO: 13381 - RNA, 22 nt, synthetic construct
  misc_feature 1..22: note = HBV-targeting guide sequence portion
  source 1..22: mol_type = other RNA
actctctgcaatgtcaacgacc

SEQ ID NO: 13382 - RNA, 22 nt, synthetic construct
  misc_feature 1..22: note = HBV-targeting guide sequence portion
  source 1..22: mol_type = other RNA
actctcttatataaaacacccg

SEQ ID NO: 13383 - RNA, 22 nt, synthetic construct
  misc_feature 1..22: note = HBV-targeting guide sequence portion
  source 1..22: mol_type = other RNA
actctgcaagatcccagagtga

SEQ ID NO: 13384 - RNA, 22 nt, synthetic construct
  misc_feature 1..22: note = HBV-targeting guide sequence portion
  source 1..22: mol_type = other RNA
actctgcggtattgtgaggatt

SEQ ID NO: 13385 - RNA, 22 nt, synthetic construct
  misc_feature 1..22: note = HBV-targeting guide sequence portion
  source 1..22: mol_type = other RNA
actctgggatcttgcagagttt

SEQ ID NO: 13386 - RNA, 22 nt, synthetic construct
  misc_feature 1..22: note = HBV-targeting guide sequence portion
  source 1..22: mol_type = other RNA
actctgttgtcctctcccgcaa

SEQ ID NO: 13387 - RNA, 22 nt, synthetic construct
  misc_feature 1..22: note = HBV-targeting guide sequence portion
  source 1..22: mol_type = other RNA
actcttggactctctgcaatgt

SEQ ID NO: 13388 - RNA, 22 nt, synthetic construct
  misc_feature 1..22: note = HBV-targeting guide sequence portion
  source 1..22: mol_type = other RNA
actgaaagccaaacagtggggg

SEQ ID NO: 13389 - RNA, 22 nt, synthetic construct
  misc_feature 1..22: note = HBV-targeting guide sequence portion
  source 1..22: mol_type = other RNA
actgaacaaatggcactagtaa

SEQ ID NO: 13390 - RNA, 22 nt, synthetic construct
  misc_feature 1..22: note = HBV-targeting guide sequence portion
  source 1..22: mol_type = other RNA
actgacaactctgttgtcctct

SEQ ID NO: 13391 - RNA, 22 nt, synthetic construct
  misc_feature 1..22: note = HBV-targeting guide sequence portion
  source 1..22: mol_type = other RNA
actgactactaggtccctagat

SEQ ID NO: 13392 - RNA, 22 nt, synthetic construct
  misc_feature 1..22: note = HBV-targeting guide sequence portion
  source 1..22: mol_type = other RNA
actgagccaagagaaacgggct

SEQ ID NO: 13393 - RNA, 22 nt, synthetic construct
  misc_feature 1..22: note = HBV-targeting guide sequence portion
  source 1..22: mol_type = other RNA
actgcacctgtattcccatccc

SEQ ID NO: 13394 - RNA, 22 nt, synthetic construct
  misc_feature 1..22: note = HBV-targeting guide sequence portion
  source 1..22: mol_type = other RNA
actgcactcaggcaagcaattc

SEQ ID NO: 13395 - RNA, 22 nt, synthetic construct
  misc_feature 1..22: note = HBV-targeting guide sequence portion
  source 1..22: mol_type = other RNA
actgcatggcctgaggatgagt

SEQ ID NO: 13396 - RNA, 22 nt, synthetic construct
  misc_feature 1..22: note = HBV-targeting guide sequence portion
  source 1..22: mol_type = other RNA
actgcctctcacatatcgtcaa

SEQ ID NO: 13397 - RNA, 22 nt, synthetic construct
  misc_feature 1..22: note = HBV-targeting guide sequence portion
  source 1..22: mol_type = other RNA
actgcgaattttggccaagaca

SEQ ID NO: 13398 - RNA, 22 nt, synthetic construct
  misc_feature 1..22: note = HBV-targeting guide sequence portion
  source 1..22: mol_type = other RNA
actgcggaactcctagccgctt

SEQ ID NO: 13399 - RNA, 22 nt, synthetic construct
  misc_feature 1..22: note = HBV-targeting guide sequence portion
  source 1..22: mol_type = other RNA
actggagccaccagcagggaga

SEQ ID NO: 13400 - RNA, 22 nt, synthetic construct
  misc_feature 1..22: note = HBV-targeting guide sequence portion
  source 1..22: mol_type = other RNA
actggatcctgcgcgggacgtc

SEQ ID NO: 13401 - RNA, 22 nt, synthetic construct
  misc_feature 1..22: note = HBV-targeting guide sequence portion
  source 1..22: mol_type = other RNA
actggcgattggtagaggcagg

SEQ ID NO: 13402 - RNA, 22 nt, synthetic construct
  misc_feature 1..22: note = HBV-targeting guide sequence portion
  source 1..22: mol_type = other RNA
actgggaggagttgggggagga

SEQ ID NO: 13403 - RNA, 22 nt, synthetic construct
  misc_feature 1..22: note = HBV-targeting guide sequence portion
  source 1..22: mol_type = other RNA
actggtggtcgggaaagaatcc

SEQ ID NO: 13404 - RNA, 22 nt, synthetic construct
  misc_feature 1..22: note = HBV-targeting guide sequence portion
  source 1..22: mol_type = other RNA
actggttggggcttggtcatag

SEQ ID NO: 13405 - RNA, 22 nt, synthetic construct
  misc_feature 1..22: note = HBV-targeting guide sequence portion
  source 1..22: mol_type = other RNA
actgtaagcgggcctacaaact

SEQ ID NO: 13406 - RNA, 22 nt, synthetic construct
  misc_feature 1..22: note = HBV-targeting guide sequence portion
  source 1..22: mol_type = other RNA
actgtacctgtctttaaccctc

SEQ ID NO: 13407 - RNA, 22 nt, synthetic construct
  misc_feature 1..22: note = HBV-targeting guide sequence portion
  source 1..22: mol_type = other RNA
actgtggagttactctcgtttt

SEQ ID NO: 13408 - RNA, 22 nt, synthetic construct
  misc_feature 1..22: note = HBV-targeting guide sequence portion
  source 1..22: mol_type = other RNA
actgttcaagcctccaagctgt

SEQ ID NO: 13409 - RNA, 22 nt, synthetic construct
  misc_feature 1..22: note = HBV-targeting guide sequence portion
  source 1..22: mol_type = other RNA
actgttcacattttttgataat

SEQ ID NO: 13410 - RNA, 22 nt, synthetic construct
  misc_feature 1..22: note = HBV-targeting guide sequence portion
  source 1..22: mol_type = other RNA
actgttcctgaactggagccac

SEQ ID NO: 13411 - RNA, 22 nt, synthetic construct
  misc_feature 1..22: note = HBV-targeting guide sequence portion
  source 1..22: mol_type = other RNA
actgtttggctttcagttatat

SEQ ID NO: 13412 - RNA, 22 nt, synthetic construct
  misc_feature 1..22: note = HBV-targeting guide sequence portion
  source 1..22: mol_type = other RNA
actgtttgtttaaagactggga

SEQ ID NO: 13413 - RNA, 22 nt, synthetic construct
  misc_feature 1..22: note = HBV-targeting guide sequence portion
  source 1..22: mol_type = other RNA
acttacaaggcctttctgtgta

SEQ ID NO: 13414 - RNA, 22 nt, synthetic construct
  misc_feature 1..22: note = HBV-targeting guide sequence portion
  source 1..22: mol_type = other RNA
acttcaaagactgtttgtttaa

SEQ ID NO: 13415 - RNA, 22 nt, synthetic construct
  misc_feature 1..22: note = HBV-targeting guide sequence portion
  source 1..22: mol_type = other RNA
acttcaatcccaacaaggatcc

SEQ ID NO: 13416 - RNA, 22 nt, synthetic construct
  misc_feature 1..22: note = HBV-targeting guide sequence portion
  source 1..22: mol_type = other RNA
acttccaaactagacactattt

SEQ ID NO: 13417 - RNA, 22 nt, synthetic construct
  misc_feature 1..22: note = HBV-targeting guide sequence portion
  source 1..22: mol_type = other RNA
acttccggagacttgtgttgtt

SEQ ID NO: 13418 - RNA, 22 nt, synthetic construct
  misc_feature 1..22: note = HBV-targeting guide sequence portion
  source 1..22: mol_type = other RNA
acttcgcttcacctctgcacgt

SEQ ID NO: 13419 - RNA, 22 nt, synthetic construct
  misc_feature 1..22: note = HBV-targeting guide sequence portion
  source 1..22: mol_type = other RNA
acttctctcaattttctagggg

SEQ ID NO: 13420 - RNA, 22 nt, synthetic construct
  misc_feature 1..22: note = HBV-targeting guide sequence portion
  source 1..22: mol_type = other RNA
acttctttccttccgtacgaga

SEQ ID NO: 13421 - RNA, 22 nt, synthetic construct
  misc_feature 1..22: note = HBV-targeting guide sequence portion
  source 1..22: mol_type = other RNA
acttgcccttggataagggtat

SEQ ID NO: 13422 - RNA, 22 nt, synthetic construct
  misc_feature 1..22: note = HBV-targeting guide sequence portion
  source 1..22: mol_type = other RNA
acttggcacagacctggccgtt

SEQ ID NO: 13423 - RNA, 22 nt, synthetic construct
  misc_feature 1..22: note = HBV-targeting guide sequence portion
  source 1..22: mol_type = other RNA
acttggcccccaataccacatc

SEQ ID NO: 13424 - RNA, 22 nt, synthetic construct
  misc_feature 1..22: note = HBV-targeting guide sequence portion
  source 1..22: mol_type = other RNA
acttgtcctggttatcgctgga

SEQ ID NO: 13425 - RNA, 22 nt, synthetic construct
  misc_feature 1..22: note = HBV-targeting guide sequence portion
  source 1..22: mol_type = other RNA
acttgtgttgttagacgacgag

SEQ ID NO: 13426 - RNA, 22 nt, synthetic construct
  misc_feature 1..22: note = HBV-targeting guide sequence portion
  source 1..22: mol_type = other RNA
actttaggcccatatgagtgtt

SEQ ID NO: 13427 - RNA, 22 nt, synthetic construct
  misc_feature 1..22: note = HBV-targeting guide sequence portion
  source 1..22: mol_type = other RNA
actttccaatcaataggcctgt

SEQ ID NO: 13428 - RNA, 22 nt, synthetic construct
  misc_feature 1..22: note = HBV-targeting guide sequence portion
  source 1..22: mol_type = other RNA
acttttggaagagaaacggtcc

SEQ ID NO: 13429 - RNA, 22 nt, synthetic construct
  misc_feature 1..22: note = HBV-targeting guide sequence portion
  source 1..22: mol_type = other RNA
actttttcacctctgcctaatc

SEQ ID NO: 13430 - RNA, 22 nt, synthetic construct
  misc_feature 1..22: note = HBV-targeting guide sequence portion
  source 1..22: mol_type = other RNA
actttttcgccaacttacaagg

SEQ ID NO: 13431 - RNA, 22 nt, synthetic construct
  misc_feature 1..22: note = HBV-targeting guide sequence portion
  source 1..22: mol_type = other RNA
agaaaactcccggttaacaggc

SEQ ID NO: 13432 - RNA, 22 nt, synthetic construct
  misc_feature 1..22: note = HBV-targeting guide sequence portion
  source 1..22: mol_type = other RNA
agaaaagacggttgaaattgat

SEQ ID NO: 13433 - RNA, 22 nt, synthetic construct
  misc_feature 1..22: note = HBV-targeting guide sequence portion
  source 1..22: mol_type = other RNA
agaaaattgagagaagtccacc

SEQ ID NO: 13434 - RNA, 22 nt, synthetic construct
  misc_feature 1..22: note = HBV-targeting guide sequence portion
  source 1..22: mol_type = other RNA
agaaaattggtaacagcggtat

SEQ ID NO: 13435 - RNA, 22 nt, synthetic construct
  misc_feature 1..22: note = HBV-targeting guide sequence portion
  source 1..22: mol_type = other RNA
agaaacactcatcctcaggcca

SEQ ID NO: 13436 - RNA, 22 nt, synthetic construct
  misc_feature 1..22: note = HBV-targeting guide sequence portion
  source 1..22: mol_type = other RNA
agaaacgggctgaggcccactc

SEQ ID NO: 13437 - RNA, 22 nt, synthetic construct
  misc_feature 1..22: note = HBV-targeting guide sequence portion
  source 1..22: mol_type = other RNA
agaaacggtcctagagtatttg

SEQ ID NO: 13438 - RNA, 22 nt, synthetic construct
  misc_feature 1..22: note = HBV-targeting guide sequence portion
  source 1..22: mol_type = other RNA
agaaaggccttgtaagttggcg

SEQ ID NO: 13439 - RNA, 22 nt, synthetic construct
  misc_feature 1..22: note = HBV-targeting guide sequence portion
  source 1..22: mol_type = other RNA
agaaatgtgaaaccacaatagt

SEQ ID NO: 13440 - RNA, 22 nt, synthetic construct
  misc_feature 1..22: note = HBV-targeting guide sequence portion
  source 1..22: mol_type = other RNA
agaacatcacatcaggattcct

SEQ ID NO: 13441 - RNA, 22 nt, synthetic construct
  misc_feature 1..22: note = HBV-targeting guide sequence portion
  source 1..22: mol_type = other RNA
agaacatctagttaatcattac

SEQ ID NO: 13442 - RNA, 22 nt, synthetic construct
  misc_feature 1..22: note = HBV-targeting guide sequence portion
  source 1..22: mol_type = other RNA
agaaccaacaagaagatgaggc

SEQ ID NO: 13443 - RNA, 22 nt, synthetic construct
  misc_feature 1..22: note = HBV-targeting guide sequence portion
  source 1..22: mol_type = other RNA
agaacctgcacgactcctgctc

SEQ ID NO: 13444 - RNA, 22 nt, synthetic construct
  misc_feature 1..22: note = HBV-targeting guide sequence portion
  source 1..22: mol_type = other RNA
agaactaatgactctagctacc

SEQ ID NO: 13445 - RNA, 22 nt, synthetic construct
  misc_feature 1..22: note = HBV-targeting guide sequence portion
  source 1..22: mol_type = other RNA
agaactccctcgcctcgcagac

SEQ ID NO: 13446 - RNA, 22 nt, synthetic construct
  misc_feature 1..22: note = HBV-targeting guide sequence portion
  source 1..22: mol_type = other RNA
agaagaaccaacaagaagatga

SEQ ID NO: 13447 - RNA, 22 nt, synthetic construct
  misc_feature 1..22: note = HBV-targeting guide sequence portion
  source 1..22: mol_type = other RNA
agaagaactccctcgcctcgca

SEQ ID NO: 13448 - RNA, 22 nt, synthetic construct
  misc_feature 1..22: note = HBV-targeting guide sequence portion
  source 1..22: mol_type = other RNA
agaagaagaactccctcgcctc

SEQ ID NO: 13449 - RNA, 22 nt, synthetic construct
  misc_feature 1..22: note = HBV-targeting guide sequence portion
  source 1..22: mol_type = other RNA
agaagaataaagccccgtaaaa

SEQ ID NO: 13450 - RNA, 22 nt, synthetic construct
  misc_feature 1..22: note = HBV-targeting guide sequence portion
  source 1..22: mol_type = other RNA
agaagacccacaattcgttgac

SEQ ID NO: 13451 - RNA, 22 nt, synthetic construct
  misc_feature 1..22: note = HBV-targeting guide sequence portion
  source 1..22: mol_type = other RNA
agaagaggacgacagggcccca

SEQ ID NO: 13452 - RNA, 22 nt, synthetic construct
  misc_feature 1..22: note = HBV-targeting guide sequence portion
  source 1..22: mol_type = other RNA
agaagatcaagcatctagggac

SEQ ID NO: 13453 - RNA, 22 nt, synthetic construct
  misc_feature 1..22: note = HBV-targeting guide sequence portion
  source 1..22: mol_type = other RNA
agaagatctcaatctcggggat

SEQ ID NO: 13454 - RNA, 22 nt, synthetic construct
  misc_feature 1..22: note = HBV-targeting guide sequence portion
  source 1..22: mol_type = other RNA
agaagatctcgtacggaaggaa

SEQ ID NO: 13455 - RNA, 22 nt, synthetic construct
  misc_feature 1..22: note = HBV-targeting guide sequence portion
  source 1..22: mol_type = other RNA
agaagatgaggcatagcagcag

SEQ ID NO: 13456 - RNA, 22 nt, synthetic construct
  misc_feature 1..22: note = HBV-targeting guide sequence portion
  source 1..22: mol_type = other RNA
agaagattgacgatatgtgaga

SEQ ID NO: 13457 - RNA, 22 nt, synthetic construct
  misc_feature 1..22: note = HBV-targeting guide sequence portion
  source 1..22: mol_type = other RNA
agaaggcaaaaacgagagtaac

SEQ ID NO: 13458 - RNA, 22 nt, synthetic construct
  misc_feature 1..22: note = HBV-targeting guide sequence portion
  source 1..22: mol_type = other RNA
agaaggcacagacggggagtcc

SEQ ID NO: 13459 - RNA, 22 nt, synthetic construct
  misc_feature 1..22: note = HBV-targeting guide sequence portion
  source 1..22: mol_type = other RNA
agaagtcagaaggcaaaaacga

SEQ ID NO: 13460 - RNA, 22 nt, synthetic construct
  misc_feature 1..22: note = HBV-targeting guide sequence portion
  source 1..22: mol_type = other RNA
agaagtccaccacgagtctaga

SEQ ID NO: 13461 - RNA, 22 nt, synthetic construct
  misc_feature 1..22: note = HBV-targeting guide sequence portion
  source 1..22: mol_type = other RNA
agaataaagccccgtaaaattt

SEQ ID NO: 13462 - RNA, 22 nt, synthetic construct
  misc_feature 1..22: note = HBV-targeting guide sequence portion
  source 1..22: mol_type = other RNA
agaataaccccatctctttgtt

SEQ ID NO: 13463 - RNA, 22 nt, synthetic construct
  misc_feature 1..22: note = HBV-targeting guide sequence portion
  source 1..22: mol_type = other RNA
agaatatggtgacccacagaat

SEQ ID NO: 13464 - RNA, 22 nt, synthetic construct
  misc_feature 1..22: note = HBV-targeting guide sequence portion
  source 1..22: mol_type = other RNA
agaatcccagaggattgctggt

SEQ ID NO: 13465 - RNA, 22 nt, synthetic construct
  misc_feature 1..22: note = HBV-targeting guide sequence portion
  source 1..22: mol_type = other RNA
agaatcctcacaataccgcaga

SEQ ID NO: 13466 - RNA, 22 nt, synthetic construct
  misc_feature 1..22: note = HBV-targeting guide sequence portion
  source 1..22: mol_type = other RNA
agaatctttccaccagcaatcc

SEQ ID NO: 13467 - RNA, 22 nt, synthetic construct
  misc_feature 1..22: note = HBV-targeting guide sequence portion
  source 1..22: mol_type = other RNA
agaatgaggcgctatgtgttga

SEQ ID NO: 13468 - RNA, 22 nt, synthetic construct
  misc_feature 1..22: note = HBV-targeting guide sequence portion
  source 1..22: mol_type = other RNA
agaatgtttcagaaaactcccg

SEQ ID NO: 13469 - RNA, 22 nt, synthetic construct
  misc_feature 1..22: note = HBV-targeting guide sequence portion
  source 1..22: mol_type = other RNA
agaatgtttgctccagaccggc

SEQ ID NO: 13470 - RNA, 22 nt, synthetic construct
  misc_feature 1..22: note = HBV-targeting guide sequence portion
  source 1..22: mol_type = other RNA
agaattgcttgcctgagtgcag

SEQ ID NO: 13471 - RNA, 22 nt, synthetic construct
  misc_feature 1..22: note = HBV-targeting guide sequence portion
  source 1..22: mol_type = other RNA
agaattggtgggcgttcacggt

SEQ ID NO: 13472 - RNA, 22 nt, synthetic construct
  misc_feature 1..22: note = HBV-targeting guide sequence portion
  source 1..22: mol_type = other RNA
agaatttggagctactgtggag

SEQ ID NO: 13473 - RNA, 22 nt, synthetic construct
  misc_feature 1..22: note = HBV-targeting guide sequence portion
  source 1..22: mol_type = other RNA
agacaaaagaaaattggtaaca

SEQ ID NO: 13474 - RNA, 22 nt, synthetic construct
  misc_feature 1..22: note = HBV-targeting guide sequence portion
  source 1..22: mol_type = other RNA
agacaactattgtggtttcaca

SEQ ID NO: 13475 - RNA, 22 nt, synthetic construct
  misc_feature 1..22: note = HBV-targeting guide sequence portion
  source 1..22: mol_type = other RNA
agacaagaaatgtgaaaccaca

SEQ ID NO: 13476 - RNA, 22 nt, synthetic construct
  misc_feature 1..22: note = HBV-targeting guide sequence portion
  source 1..22: mol_type = other RNA
agacacacggtagttcccccta

SEQ ID NO: 13477 - RNA, 22 nt, synthetic construct
  misc_feature 1..22: note = HBV-targeting guide sequence portion
  source 1..22: mol_type = other RNA
agacacatccagcgataaccag

SEQ ID NO: 13478 - RNA, 22 nt, synthetic construct
  misc_feature 1..22: note = HBV-targeting guide sequence portion
  source 1..22: mol_type = other RNA
agacaccaaatactctaggacc

SEQ ID NO: 13479 - RNA, 22 nt, synthetic construct
  misc_feature 1..22: note = HBV-targeting guide sequence portion
  source 1..22: mol_type = other RNA
agacactatttacacactctat

SEQ ID NO: 13480 - RNA, 22 nt, synthetic construct
  misc_feature 1..22: note = HBV-targeting guide sequence portion
  source 1..22: mol_type = other RNA
agacagcggggtaggctgccgt

SEQ ID NO: 13481 - RNA, 22 nt, synthetic construct
  misc_feature 1..22: note = HBV-targeting guide sequence portion
  source 1..22: mol_type = other RNA
agacaggtacagtagaagaata

SEQ ID NO: 13482 - RNA, 22 nt, synthetic construct
  misc_feature 1..22: note = HBV-targeting guide sequence portion
  source 1..22: mol_type = other RNA
agaccaatttatgcctacagcc

SEQ ID NO: 13483 - RNA, 22 nt, synthetic construct
  misc_feature 1..22: note = HBV-targeting guide sequence portion
  source 1..22: mol_type = other RNA
agaccaccaaatgcccctatcc

SEQ ID NO: 13484 - RNA, 22 nt, synthetic construct
  misc_feature 1..22: note = HBV-targeting guide sequence portion
  source 1..22: mol_type = other RNA
agaccaccgtgaacgcccacca

SEQ ID NO: 13485 - RNA, 22 nt, synthetic construct
  misc_feature 1..22: note = HBV-targeting guide sequence portion
  source 1..22: mol_type = other RNA
agacccacaattcgttgacaca

SEQ ID NO: 13486 - RNA, 22 nt, synthetic construct
  misc_feature 1..22: note = HBV-targeting guide sequence portion
  source 1..22: mol_type = other RNA
agaccggctgcgagcaaaacaa

SEQ ID NO: 13487 - RNA, 22 nt, synthetic construct
  misc_feature 1..22: note = HBV-targeting guide sequence portion
  source 1..22: mol_type = other RNA
agacctggccgttgcctggcaa

SEQ ID NO: 13488 - RNA, 22 nt, synthetic construct
  misc_feature 1..22: note = HBV-targeting guide sequence portion
  source 1..22: mol_type = other RNA
agaccttgggcaagaattggtg

SEQ ID NO: 13489 - RNA, 22 nt, synthetic construct
  misc_feature 1..22: note = HBV-targeting guide sequence portion
  source 1..22: mol_type = other RNA
agacgaagatctcaatcgccgc

SEQ ID NO: 13490 - RNA, 22 nt, synthetic construct
  misc_feature 1..22: note = HBV-targeting guide sequence portion
  source 1..22: mol_type = other RNA
agacgacgaggcaggtccccta

SEQ ID NO: 13491 - RNA, 22 nt, synthetic construct
  misc_feature 1..22: note = HBV-targeting guide sequence portion
  source 1..22: mol_type = other RNA
agacgccaacaaggtaggagct

SEQ ID NO: 13492 - RNA, 22 nt, synthetic construct
  misc_feature 1..22: note = HBV-targeting guide sequence portion
  source 1..22: mol_type = other RNA
agacgggaaacataccttgata

SEQ ID NO: 13493 - RNA, 22 nt, synthetic construct
  misc_feature 1..22: note = HBV-targeting guide sequence portion
  source 1..22: mol_type = other RNA
agacggggagtccgcgtaaaga

SEQ ID NO: 13494 - RNA, 22 nt, synthetic construct
  misc_feature 1..22: note = HBV-targeting guide sequence portion
  source 1..22: mol_type = other RNA
agacggttgaaattgattatgc

SEQ ID NO: 13495 - RNA, 22 nt, synthetic construct
  misc_feature 1..22: note = HBV-targeting guide sequence portion
  source 1..22: mol_type = other RNA
agactccaaggcatcccgatac

SEQ ID NO: 13496 - RNA, 22 nt, synthetic construct
  misc_feature 1..22: note = HBV-targeting guide sequence portion
  source 1..22: mol_type = other RNA
agactcgtggtggacttctctc

SEQ ID NO: 13497 - RNA, 22 nt, synthetic construct
  misc_feature 1..22: note = HBV-targeting guide sequence portion
  source 1..22: mol_type = other RNA
agactctgcggtattgtgagga

SEQ ID NO: 13498 - RNA, 22 nt, synthetic construct
  misc_feature 1..22: note = HBV-targeting guide sequence portion
  source 1..22: mol_type = other RNA
agactgggaggagttgggggag

SEQ ID NO: 13499 - RNA, 22 nt, synthetic construct
  misc_feature 1..22: note = HBV-targeting guide sequence portion
  source 1..22: mol_type = other RNA
agactgtttgtttaaagactgg

SEQ ID NO: 13500 - RNA, 22 nt, synthetic construct
  misc_feature 1..22: note = HBV-targeting guide sequence portion
  source 1..22: mol_type = other RNA
agacttggcccccaataccaca

SEQ ID NO: 13501 - RNA, 22 nt, synthetic construct
  misc_feature 1..22: note = HBV-targeting guide sequence portion
  source 1..22: mol_type = other RNA
agacttgtgttgttagacgacg

SEQ ID NO: 13502 - RNA, 22 nt, synthetic construct
  misc_feature 1..22: note = HBV-targeting guide sequence portion
  source 1..22: mol_type = other RNA
agagaaacgggctgaggcccac

SEQ ID NO: 13503 - RNA, 22 nt, synthetic construct
  misc_feature 1..22: note = HBV-targeting guide sequence portion
  source 1..22: mol_type = other RNA
agagaaacggtcctagagtatt

SEQ ID NO: 13504 - RNA, 22 nt, synthetic construct
  misc_feature 1..22: note = HBV-targeting guide sequence portion
  source 1..22: mol_type = other RNA
agagaagaggacgacagggccc

SEQ ID NO: 13505 - RNA, 22 nt, synthetic construct
  misc_feature 1..22: note = HBV-targeting guide sequence portion
  source 1..22: mol_type = other RNA
agagaagtccaccacgagtcta

SEQ ID NO: 13506 - RNA, 22 nt, synthetic construct
  misc_feature 1..22: note = HBV-targeting guide sequence portion
  source 1..22: mol_type = other RNA
agagaataaccccatctctttg

SEQ ID NO: 13507 - RNA, 22 nt, synthetic construct
  misc_feature 1..22: note = HBV-targeting guide sequence portion
  source 1..22: mol_type = other RNA
agagaggtgcgccccgtggtcg

SEQ ID NO: 13508 - RNA, 22 nt, synthetic construct
  misc_feature 1..22: note = HBV-targeting guide sequence portion
  source 1..22: mol_type = other RNA
agagagtccaagagtcctctta

SEQ ID NO: 13509 - RNA, 22 nt, synthetic construct
  misc_feature 1..22: note = HBV-targeting guide sequence portion
  source 1..22: mol_type = other RNA
agagagtgtcaacacatagcgc

SEQ ID NO: 13510 - RNA, 22 nt, synthetic construct
  misc_feature 1..22: note = HBV-targeting guide sequence portion
  source 1..22: mol_type = other RNA
agagatgattaggcagaggtga

SEQ ID NO: 13511 - RNA, 22 nt, synthetic construct
  misc_feature 1..22: note = HBV-targeting guide sequence portion
  source 1..22: mol_type = other RNA
agagatggggttattctcttaa

SEQ ID NO: 13512 - RNA, 22 nt, synthetic construct
  misc_feature 1..22: note = HBV-targeting guide sequence portion
  source 1..22: mol_type = other RNA
agagcaaactccaacaatccag

SEQ ID NO: 13513 - RNA, 22 nt, synthetic construct
  misc_feature 1..22: note = HBV-targeting guide sequence portion
  source 1..22: mol_type = other RNA
agagctacagcatggggcagaa

SEQ ID NO: 13514 - RNA, 22 nt, synthetic construct
  misc_feature 1..22: note = HBV-targeting guide sequence portion
  source 1..22: mol_type = other RNA
agagctgcggcggtatctagaa

SEQ ID NO: 13515 - RNA, 22 nt, synthetic construct
  misc_feature 1..22: note = HBV-targeting guide sequence portion
  source 1..22: mol_type = other RNA
agaggaagatgataaaacgccg

SEQ ID NO: 13516 - RNA, 22 nt, synthetic construct
  misc_feature 1..22: note = HBV-targeting guide sequence portion
  source 1..22: mol_type = other RNA
agaggacaacagagttgtcagt

SEQ ID NO: 13517 - RNA, 22 nt, synthetic construct
  misc_feature 1..22: note = HBV-targeting guide sequence portion
  source 1..22: mol_type = other RNA
agaggacagacgggaaacatac

SEQ ID NO: 13518 - RNA, 22 nt, synthetic construct
  misc_feature 1..22: note = HBV-targeting guide sequence portion
  source 1..22: mol_type = other RNA
agaggacgacagggccccaagc

SEQ ID NO: 13519 - RNA, 22 nt, synthetic construct
  misc_feature 1..22: note = HBV-targeting guide sequence portion
  source 1..22: mol_type = other RNA
agaggactcttggactctctgc

SEQ ID NO: 13520 - RNA, 22 nt, synthetic construct
  misc_feature 1..22: note = HBV-targeting guide sequence portion
  source 1..22: mol_type = other RNA
agaggagccggaaaggttccac

SEQ ID NO: 13521 - RNA, 22 nt, synthetic construct
  misc_feature 1..22: note = HBV-targeting guide sequence portion
  source 1..22: mol_type = other RNA
agaggattgctggtggaaagat

SEQ ID NO: 13522 - RNA, 22 nt, synthetic construct
  misc_feature 1..22: note = HBV-targeting guide sequence portion
  source 1..22: mol_type = other RNA
agaggcaggaggcggatttgct

SEQ ID NO: 13523 - RNA, 22 nt, synthetic construct
  misc_feature 1..22: note = HBV-targeting guide sequence portion
  source 1..22: mol_type = other RNA
agaggcagtagtcggaacaggg

SEQ ID NO: 13524 - RNA, 22 nt, synthetic construct
  misc_feature 1..22: note = HBV-targeting guide sequence portion
  source 1..22: mol_type = other RNA
agaggcctgtatctccctgctg

SEQ ID NO: 13525 - RNA, 22 nt, synthetic construct
  misc_feature 1..22: note = HBV-targeting guide sequence portion
  source 1..22: mol_type = other RNA
agagggtgttttccaatgaggg

SEQ ID NO: 13526 - RNA, 22 nt, synthetic construct
  misc_feature 1..22: note = HBV-targeting guide sequence portion
  source 1..22: mol_type = other RNA
agaggtgaaaaagttgcatggt

SEQ ID NO: 13527 - RNA, 22 nt, synthetic construct
  misc_feature 1..22: note = HBV-targeting guide sequence portion
  source 1..22: mol_type = other RNA
agaggtgaagcgaagtgcacac

SEQ ID NO: 13528 - RNA, 22 nt, synthetic construct
  misc_feature 1..22: note = HBV-targeting guide sequence portion
  source 1..22: mol_type = other RNA
agaggtgcgccccgtggtcggt

SEQ ID NO: 13529 - RNA, 22 nt, synthetic construct
  misc_feature 1..22: note = HBV-targeting guide sequence portion
  source 1..22: mol_type = other RNA
agaggtggagacagcggggtag

SEQ ID NO: 13530 - RNA, 22 nt, synthetic construct
  misc_feature 1..22: note = HBV-targeting guide sequence portion
  source 1..22: mol_type = other RNA
agaggttccttgagcaggagtc

SEQ ID NO: 13531 - RNA, 22 nt, synthetic construct
  misc_feature 1..22: note = HBV-targeting guide sequence portion
  source 1..22: mol_type = other RNA
agagtaactccacagtagctcc

SEQ ID NO: 13532 - RNA, 22 nt, synthetic construct
  misc_feature 1..22: note = HBV-targeting guide sequence portion
  source 1..22: mol_type = other RNA
agagtatttggtgtcttttgga

SEQ ID NO: 13533 - RNA, 22 nt, synthetic construct
  misc_feature 1..22: note = HBV-targeting guide sequence portion
  source 1..22: mol_type = other RNA
agagtcattagttctccccagc

SEQ ID NO: 13534 - RNA, 22 nt, synthetic construct
  misc_feature 1..22: note = HBV-targeting guide sequence portion
  source 1..22: mol_type = other RNA
agagtccaagagtcctcttatg

SEQ ID NO: 13535 - RNA, 22 nt, synthetic construct
  misc_feature 1..22: note = HBV-targeting guide sequence portion
  source 1..22: mol_type = other RNA
agagtcctcttatgtaagacct

SEQ ID NO: 13536 - RNA, 22 nt, synthetic construct
  misc_feature 1..22: note = HBV-targeting guide sequence portion
  source 1..22: mol_type = other RNA
agagtctagactcgtggtggac

SEQ ID NO: 13537 - RNA, 22 nt, synthetic construct
  misc_feature 1..22: note = HBV-targeting guide sequence portion
  source 1..22: mol_type = other RNA
agagtgagaggcctgtatctcc

SEQ ID NO: 13538 - RNA, 22 nt, synthetic construct
  misc_feature 1..22: note = HBV-targeting guide sequence portion
  source 1..22: mol_type = other RNA
agagtgtcaacacatagcgcct

SEQ ID NO: 13539 - RNA, 22 nt, synthetic construct
  misc_feature 1..22: note = HBV-targeting guide sequence portion
  source 1..22: mol_type = other RNA
agagtgtgtaaatagtgtctag

SEQ ID NO: 13540 - RNA, 22 nt, synthetic construct
  misc_feature 1..22: note = HBV-targeting guide sequence portion
  source 1..22: mol_type = other RNA
agagttgtcagtcccgagaatg

SEQ ID NO: 13541 - RNA, 22 nt, synthetic construct
  misc_feature 1..22: note = HBV-targeting guide sequence portion
  source 1..22: mol_type = other RNA
agatacaggcctctcactctgg

SEQ ID NO: 13542 - RNA, 22 nt, synthetic construct
  misc_feature 1..22: note = HBV-targeting guide sequence portion
  source 1..22: mol_type = other RNA
agataccgccgcagctctgtat

SEQ ID NO: 13543 - RNA, 22 nt, synthetic construct
  misc_feature 1..22: note = HBV-targeting guide sequence portion
  source 1..22: mol_type = other RNA
agatattatcaaaaaatgtgaa

SEQ ID NO: 13544 - RNA, 22 nt, synthetic construct
  misc_feature 1..22: note = HBV-targeting guide sequence portion
  source 1..22: mol_type = other RNA
agatcaagcatctagggaccta

SEQ ID NO: 13545 - RNA, 22 nt, synthetic construct
  misc_feature 1..22: note = HBV-targeting guide sequence portion
  source 1..22: mol_type = other RNA
agatcattaatctaatctcctc

SEQ ID NO: 13546 - RNA, 22 nt, synthetic construct
  misc_feature 1..22: note = HBV-targeting guide sequence portion
  source 1..22: mol_type = other RNA
agatcccagagtgagaggcctg

SEQ ID NO: 13547 - RNA, 22 nt, synthetic construct
  misc_feature 1..22: note = HBV-targeting guide sequence portion
  source 1..22: mol_type = other RNA
agatccccgagattgagatctt

SEQ ID NO: 13548 - RNA, 22 nt, synthetic construct
  misc_feature 1..22: note = HBV-targeting guide sequence portion
  source 1..22: mol_type = other RNA
agatctcaatcgccgcgtcgca

SEQ ID NO: 13549 - RNA, 22 nt, synthetic construct
  misc_feature 1..22: note = HBV-targeting guide sequence portion
  source 1..22: mol_type = other RNA
agatctcaatctcggggatctc

SEQ ID NO: 13550 - RNA, 22 nt, synthetic construct
  misc_feature 1..22: note = HBV-targeting guide sequence portion
  source 1..22: mol_type = other RNA
agatctcgtacggaaggaaaga

SEQ ID NO: 13551 - RNA, 22 nt, synthetic construct
  misc_feature 1..22: note = HBV-targeting guide sequence portion
  source 1..22: mol_type = other RNA
agatcttcgtctgcgaggcgag

SEQ ID NO: 13552 - RNA, 22 nt, synthetic construct
  misc_feature 1..22: note = HBV-targeting guide sequence portion
  source 1..22: mol_type = other RNA
agatcttctagataccgccgca

SEQ ID NO: 13553 - RNA, 22 nt, synthetic construct
  misc_feature 1..22: note = HBV-targeting guide sequence portion
  source 1..22: mol_type = other RNA
agatcttctgcgacgcggcgat

SEQ ID NO: 13554 - RNA, 22 nt, synthetic construct
  misc_feature 1..22: note = HBV-targeting guide sequence portion
  source 1..22: mol_type = other RNA
agatgagaaggcacagacgggg

SEQ ID NO: 13555 - RNA, 22 nt, synthetic construct
  misc_feature 1..22: note = HBV-targeting guide sequence portion
  source 1..22: mol_type = other RNA
agatgaggcatagcagcaggat

SEQ ID NO: 13556 - RNA, 22 nt, synthetic construct
  misc_feature 1..22: note = HBV-targeting guide sequence portion
  source 1..22: mol_type = other RNA
agatgataaaacgccgcagaca

SEQ ID NO: 13557 - RNA, 22 nt, synthetic construct
  misc_feature 1..22: note = HBV-targeting guide sequence portion
  source 1..22: mol_type = other RNA
agatgattaggcagaggtgaaa

SEQ ID NO: 13558 - RNA, 22 nt, synthetic construct
  misc_feature 1..22: note = HBV-targeting guide sequence portion
  source 1..22: mol_type = other RNA
agatgctgtacagacttggccc

SEQ ID NO: 13559 - RNA, 22 nt, synthetic construct
  misc_feature 1..22: note = HBV-targeting guide sequence portion
  source 1..22: mol_type = other RNA
agatgcttgatcttctaaatta

SEQ ID NO: 13560 - RNA, 22 nt, synthetic construct
  misc_feature 1..22: note = HBV-targeting guide sequence portion
  source 1..22: mol_type = other RNA
agatggggttattctcttaatt

SEQ ID NO: 13561 - RNA, 22 nt, synthetic construct
  misc_feature 1..22: note = HBV-targeting guide sequence portion
  source 1..22: mol_type = other RNA
agatgggtcgtccgcgggattc

SEQ ID NO: 13562 - RNA, 22 nt, synthetic construct
  misc_feature 1..22: note = HBV-targeting guide sequence portion
  source 1..22: mol_type = other RNA
agatgtatattaggaaaagagg

SEQ ID NO: 13563 - RNA, 22 nt, synthetic construct
  misc_feature 1..22: note = HBV-targeting guide sequence portion
  source 1..22: mol_type = other RNA
agatgttctggataataaggtt

SEQ ID NO: 13564 - RNA, 22 nt, synthetic construct
  misc_feature 1..22: note = HBV-targeting guide sequence portion
  source 1..22: mol_type = other RNA
agattaatgatctttgtactag

SEQ ID NO: 13565 - RNA, 22 nt, synthetic construct
  misc_feature 1..22: note = HBV-targeting guide sequence portion
  source 1..22: mol_type = other RNA
agattagattaatgatctttgt

SEQ ID NO: 13566 - RNA, 22 nt, synthetic construct
  misc_feature 1..22: note = HBV-targeting guide sequence portion
  source 1..22: mol_type = other RNA
agattctgccccatgctgtagc

SEQ ID NO: 13567 - RNA, 22 nt, synthetic construct
  misc_feature 1..22: note = HBV-targeting guide sequence portion
  source 1..22: mol_type = other RNA
agattgaatacatgcatacaag

SEQ ID NO: 13568 - RNA, 22 nt, synthetic construct
  misc_feature 1..22: note = HBV-targeting guide sequence portion
  source 1..22: mol_type = other RNA
agattgacgatatgtgagaggc

SEQ ID NO: 13569 - RNA, 22 nt, synthetic construct
  misc_feature 1..22: note = HBV-targeting guide sequence portion
  source 1..22: mol_type = other RNA
agattgagatcttctgcgacgc

SEQ ID NO: 13570 - RNA, 22 nt, synthetic construct
  misc_feature 1..22: note = HBV-targeting guide sequence portion
  source 1..22: mol_type = other RNA
agattgggacttcaatcccaac

SEQ ID NO: 13571 - RNA, 22 nt, synthetic construct
  misc_feature 1..22: note = HBV-targeting guide sequence portion
  source 1..22: mol_type = other RNA
agcaaaacaagcggctaggagt

SEQ ID NO: 13572 - RNA, 22 nt, synthetic construct
  misc_feature 1..22: note = HBV-targeting guide sequence portion
  source 1..22: mol_type = other RNA
agcaaaacccagaagacccaca

SEQ ID NO: 13573 - RNA, 22 nt, synthetic construct
  misc_feature 1..22: note = HBV-targeting guide sequence portion
  source 1..22: mol_type = other RNA
agcaaacacttggcacagacct

SEQ ID NO: 13574 - RNA, 22 nt, synthetic construct
  misc_feature 1..22: note = HBV-targeting guide sequence portion
  source 1..22: mol_type = other RNA
agcaaacattctcgggactgac

SEQ ID NO: 13575 - RNA, 22 nt, synthetic construct
  misc_feature 1..22: note = HBV-targeting guide sequence portion
  source 1..22: mol_type = other RNA
agcaaactccaacaatccagat

SEQ ID NO: 13576 - RNA, 22 nt, synthetic construct
  misc_feature 1..22: note = HBV-targeting guide sequence portion
  source 1..22: mol_type = other RNA
agcaaagaattgcttgcctgag

SEQ ID NO: 13577 - RNA, 22 nt, synthetic construct
  misc_feature 1..22: note = HBV-targeting guide sequence portion
  source 1..22: mol_type = other RNA
agcaaatccgcctcctgcctct

SEQ ID NO: 13578 - RNA, 22 nt, synthetic construct
  misc_feature 1..22: note = HBV-targeting guide sequence portion
  source 1..22: mol_type = other RNA
agcaacaggagggatacataga

SEQ ID NO: 13579 - RNA, 22 nt, synthetic construct
  misc_feature 1..22: note = HBV-targeting guide sequence portion
  source 1..22: mol_type = other RNA
agcaatcctctgggattctttc

SEQ ID NO: 13580 - RNA, 22 nt, synthetic construct
  misc_feature 1..22: note = HBV-targeting guide sequence portion
  source 1..22: mol_type = other RNA
agcaattctttgctggggagaa

SEQ ID NO: 13581 - RNA, 22 nt, synthetic construct
  misc_feature 1..22: note = HBV-targeting guide sequence portion
  source 1..22: mol_type = other RNA
agcacagcctagcagccatggg

SEQ ID NO: 13582 - RNA, 22 nt, synthetic construct
  misc_feature 1..22: note = HBV-targeting guide sequence portion
  source 1..22: mol_type = other RNA
agcaccatgcaactttttcacc

SEQ ID NO: 13583 - RNA, 22 nt, synthetic construct
  misc_feature 1..22: note = HBV-targeting guide sequence portion
  source 1..22: mol_type = other RNA
agcacgggaccctgcagaacct

SEQ ID NO: 13584 - RNA, 22 nt, synthetic construct
  misc_feature 1..22: note = HBV-targeting guide sequence portion
  source 1..22: mol_type = other RNA
agcagcaggatgaagaggaaga

SEQ ID NO: 13585 - RNA, 22 nt, synthetic construct
  misc_feature 1..22: note = HBV-targeting guide sequence portion
  source 1..22: mol_type = other RNA
agcagccatgggaacgatgtat

SEQ ID NO: 13586 - RNA, 22 nt, synthetic construct
  misc_feature 1..22: note = HBV-targeting guide sequence portion
  source 1..22: mol_type = other RNA
agcaggagtcgtgcaggttctg

SEQ ID NO: 13587 - RNA, 22 nt, synthetic construct
  misc_feature 1..22: note = HBV-targeting guide sequence portion
  source 1..22: mol_type = other RNA
agcaggataaccacattgtgta

SEQ ID NO: 13588 - RNA, 22 nt, synthetic construct
  misc_feature 1..22: note = HBV-targeting guide sequence portion
  source 1..22: mol_type = other RNA
agcaggatgaagaggaagatga

SEQ ID NO: 13589 - RNA, 22 nt, synthetic construct
  misc_feature 1..22: note = HBV-targeting guide sequence portion
  source 1..22: mol_type = other RNA
agcaggcataatcaatttcaac

SEQ ID NO: 13590 - RNA, 22 nt, synthetic construct
  misc_feature 1..22: note = HBV-targeting guide sequence portion
  source 1..22: mol_type = other RNA
agcaggctttcactttttcgcc

SEQ ID NO: 13591 - RNA, 22 nt, synthetic construct
  misc_feature 1..22: note = HBV-targeting guide sequence portion
  source 1..22: mol_type = other RNA
agcagggagatacaggcctctc

SEQ ID NO: 13592 - RNA, 22 nt, synthetic construct
  misc_feature 1..22: note = HBV-targeting guide sequence portion
  source 1..22: mol_type = other RNA
agcaggggtcctaggaatcctg

SEQ ID NO: 13593 - RNA, 22 nt, synthetic construct
  misc_feature 1..22: note = HBV-targeting guide sequence portion
  source 1..22: mol_type = other RNA
agcatctagggacctagtagtc

SEQ ID NO: 13594 - RNA, 22 nt, synthetic construct
  misc_feature 1..22: note = HBV-targeting guide sequence portion
  source 1..22: mol_type = other RNA
agcatcttgagtccctttatac

SEQ ID NO: 13595 - RNA, 22 nt, synthetic construct
  misc_feature 1..22: note = HBV-targeting guide sequence portion
  source 1..22: mol_type = other RNA
agcatggggcagaatctttcca

SEQ ID NO: 13596 - RNA, 22 nt, synthetic construct
  misc_feature 1..22: note = HBV-targeting guide sequence portion
  source 1..22: mol_type = other RNA
agcattcgggctagggttcacc

SEQ ID NO: 13597 - RNA, 22 nt, synthetic construct
  misc_feature 1..22: note = HBV-targeting guide sequence portion
  source 1..22: mol_type = other RNA
agcattgttcacctcaccatac

SEQ ID NO: 13598 - RNA, 22 nt, synthetic construct
  misc_feature 1..22: note = HBV-targeting guide sequence portion
  source 1..22: mol_type = other RNA
agccaaacagtgggggaaagcc

SEQ ID NO: 13599 - RNA, 22 nt, synthetic construct
  misc_feature 1..22: note = HBV-targeting guide sequence portion
  source 1..22: mol_type = other RNA
agccaagagaaacgggctgagg

SEQ ID NO: 13600 - RNA, 22 nt, synthetic construct
  misc_feature 1..22: note = HBV-targeting guide sequence portion
  source 1..22: mol_type = other RNA
agccaccagcagggagatacag

SEQ ID NO: 13601 - RNA, 22 nt, synthetic construct
  misc_feature 1..22: note = HBV-targeting guide sequence portion
  source 1..22: mol_type = other RNA
agccacccaaggcacagcttgg

SEQ ID NO: 13602 - RNA, 22 nt, synthetic construct
  misc_feature 1..22: note = HBV-targeting guide sequence portion
  source 1..22: mol_type = other RNA
agccatgggaacgatgtatatt

SEQ ID NO: 13603 - RNA, 22 nt, synthetic construct
  misc_feature 1..22: note = HBV-targeting guide sequence portion
  source 1..22: mol_type = other RNA
agcccaggatgatgggatggga

SEQ ID NO: 13604 - RNA, 22 nt, synthetic construct
  misc_feature 1..22: note = HBV-targeting guide sequence portion
  source 1..22: mol_type = other RNA
agcccatgaaattaagagaata

SEQ ID NO: 13605 - RNA, 22 nt, synthetic construct
  misc_feature 1..22: note = HBV-targeting guide sequence portion
  source 1..22: mol_type = other RNA
agccccaaccagtgggggttgc

SEQ ID NO: 13606 - RNA, 22 nt, synthetic construct
  misc_feature 1..22: note = HBV-targeting guide sequence portion
  source 1..22: mol_type = other RNA
agccccgtaaaatttcccacct

SEQ ID NO: 13607 - RNA, 22 nt, synthetic construct
  misc_feature 1..22: note = HBV-targeting guide sequence portion
  source 1..22: mol_type = other RNA
agcccgaatgctccagctccta

SEQ ID NO: 13608 - RNA, 22 nt, synthetic construct
  misc_feature 1..22: note = HBV-targeting guide sequence portion
  source 1..22: mol_type = other RNA
agcccgtttctcttggctcagt

SEQ ID NO: 13609 - RNA, 22 nt, synthetic construct
  misc_feature 1..22: note = HBV-targeting guide sequence portion
  source 1..22: mol_type = other RNA
agccctacgaaccactgaacaa

SEQ ID NO: 13610 - RNA, 22 nt, synthetic construct
  misc_feature 1..22: note = HBV-targeting guide sequence portion
  source 1..22: mol_type = other RNA
agccctcaggctcagggcataa

SEQ ID NO: 13611 - RNA, 22 nt, synthetic construct
  misc_feature 1..22: note = HBV-targeting guide sequence portion
  source 1..22: mol_type = other RNA
agccgcttgttttgctcgcagc

SEQ ID NO: 13612 - RNA, 22 nt, synthetic construct
  misc_feature 1..22: note = HBV-targeting guide sequence portion
  source 1..22: mol_type = other RNA
agccggaaaggttccacgcatg

SEQ ID NO: 13613 - RNA, 22 nt, synthetic construct
  misc_feature 1..22: note = HBV-targeting guide sequence portion
  source 1..22: mol_type = other RNA
agccggtctggagcaaacattc

SEQ ID NO: 13614 - RNA, 22 nt, synthetic construct
  misc_feature 1..22: note = HBV-targeting guide sequence portion
  source 1..22: mol_type = other RNA
agcctaccccgctgtctccacc

SEQ ID NO: 13615 - RNA, 22 nt, synthetic construct
  misc_feature 1..22: note = HBV-targeting guide sequence portion
  source 1..22: mol_type = other RNA
agcctagcagccatgggaacga

SEQ ID NO: 13616 - RNA, 22 nt, synthetic construct
  misc_feature 1..22: note = HBV-targeting guide sequence portion
  source 1..22: mol_type = other RNA
agcctccaagctgtgccttggg

SEQ ID NO: 13617 - RNA, 22 nt, synthetic construct
  misc_feature 1..22: note = HBV-targeting guide sequence portion
  source 1..22: mol_type = other RNA
agcctcctagtacaaagatcat

SEQ ID NO: 13618 - RNA, 22 nt, synthetic construct
  misc_feature 1..22: note = HBV-targeting guide sequence portion
  source 1..22: mol_type = other RNA
agcctgagggctccaccccaaa

SEQ ID NO: 13619 - RNA, 22 nt, synthetic construct
  misc_feature 1..22: note = HBV-targeting guide sequence portion
  source 1..22: mol_type = other RNA
agcctgcttagattgaatacat

SEQ ID NO: 13620 - RNA, 22 nt, synthetic construct
  misc_feature 1..22: note = HBV-targeting guide sequence portion
  source 1..22: mol_type = other RNA
agccttcagagcaaactccaac

SEQ ID NO: 13621 - RNA, 22 nt, synthetic construct
  misc_feature 1..22: note = HBV-targeting guide sequence portion
  source 1..22: mol_type = other RNA
agcgaagtgcacacggtccggc

SEQ ID NO: 13622 - RNA, 22 nt, synthetic construct
  misc_feature 1..22: note = HBV-targeting guide sequence portion
  source 1..22: mol_type = other RNA
agcgataaccaggacaagttgg

SEQ ID NO: 13623 - RNA, 22 nt, synthetic construct
  misc_feature 1..22: note = HBV-targeting guide sequence portion
  source 1..22: mol_type = other RNA
agcgcagggtccccaatcctcg

SEQ ID NO: 13624 - RNA, 22 nt, synthetic construct
  misc_feature 1..22: note = HBV-targeting guide sequence portion
  source 1..22: mol_type = other RNA
agcgcatgcgtggaacctttcc

SEQ ID NO: 13625 - RNA, 22 nt, synthetic construct
  misc_feature 1..22: note = HBV-targeting guide sequence portion
  source 1..22: mol_type = other RNA
agcgccgacgggacgtaaacaa

SEQ ID NO: 13626 - RNA, 22 nt, synthetic construct
  misc_feature 1..22: note = HBV-targeting guide sequence portion
  source 1..22: mol_type = other RNA
agcgcctcattctgtgggtcac

SEQ ID NO: 13627 - RNA, 22 nt, synthetic construct
  misc_feature 1..22: note = HBV-targeting guide sequence portion
  source 1..22: mol_type = other RNA
agcggcctcgagatgggtcgtc

SEQ ID NO: 13628 - RNA, 22 nt, synthetic construct
  misc_feature 1..22: note = HBV-targeting guide sequence portion
  source 1..22: mol_type = other RNA
agcggctaggagttccgcagta

SEQ ID NO: 13629 - RNA, 22 nt, synthetic construct
  misc_feature 1..22: note = HBV-targeting guide sequence portion
  source 1..22: mol_type = other RNA
agcgggcctacaaactgttcac

SEQ ID NO: 13630 - RNA, 22 nt, synthetic construct
  misc_feature 1..22: note = HBV-targeting guide sequence portion
  source 1..22: mol_type = other RNA
agcggggtaggctgccgtcctg

SEQ ID NO: 13631 - RNA, 22 nt, synthetic construct
  misc_feature 1..22: note = HBV-targeting guide sequence portion
  source 1..22: mol_type = other RNA
agcggtataaagggactcaaga

SEQ ID NO: 13632 - RNA, 22 nt, synthetic construct
  misc_feature 1..22: note = HBV-targeting guide sequence portion
  source 1..22: mol_type = other RNA
agctacagcatggggcagaatc

SEQ ID NO: 13633 - RNA, 22 nt, synthetic construct
  misc_feature 1..22: note = HBV-targeting guide sequence portion
  source 1..22: mol_type = other RNA
agctacctgggtgggtactaat

SEQ ID NO: 13634 - RNA, 22 nt, synthetic construct
  misc_feature 1..22: note = HBV-targeting guide sequence portion
  source 1..22: mol_type = other RNA
agctactgtggagttactctcg

SEQ ID NO: 13635 - RNA, 22 nt, synthetic construct
  misc_feature 1..22: note = HBV-targeting guide sequence portion
  source 1..22: mol_type = other RNA
agctagagtcattagttctccc

SEQ ID NO: 13636 - RNA, 22 nt, synthetic construct
  misc_feature 1..22: note = HBV-targeting guide sequence portion
  source 1..22: mol_type = other RNA
agctccaaattctttatatggg

SEQ ID NO: 13637 - RNA, 22 nt, synthetic construct
  misc_feature 1..22: note = HBV-targeting guide sequence portion
  source 1..22: mol_type = other RNA
agctcctaccttgttggcgtct

SEQ ID NO: 13638 - RNA, 22 nt, synthetic construct
  misc_feature 1..22: note = HBV-targeting guide sequence portion
  source 1..22: mol_type = other RNA
agctctgtatcgggatgccttg

SEQ ID NO: 13639 - RNA, 22 nt, synthetic construct
  misc_feature 1..22: note = HBV-targeting guide sequence portion
  source 1..22: mol_type = other RNA
agctcttgttcccaagaatatg

SEQ ID NO: 13640 - RNA, 22 nt, synthetic construct
  misc_feature 1..22: note = HBV-targeting guide sequence portion
  source 1..22: mol_type = other RNA
agctgcggcggtatctagaaga

SEQ ID NO: 13641 - RNA, 22 nt, synthetic construct
  misc_feature 1..22: note = HBV-targeting guide sequence portion
  source 1..22: mol_type = other RNA
agctggagcattcgggctaggg

SEQ ID NO: 13642 - RNA, 22 nt, synthetic construct
  misc_feature 1..22: note = HBV-targeting guide sequence portion
  source 1..22: mol_type = other RNA
agctggaggagtgcgaatccac

SEQ ID NO: 13643 - RNA, 22 nt, synthetic construct
  misc_feature 1..22: note = HBV-targeting guide sequence portion
  source 1..22: mol_type = other RNA
agctgtgccttgggtggcttta

SEQ ID NO: 13644 - RNA, 22 nt, synthetic construct
  misc_feature 1..22: note = HBV-targeting guide sequence portion
  source 1..22: mol_type = other RNA
agcttatagaccaccaaatgcc

SEQ ID NO: 13645 - RNA, 22 nt, synthetic construct
  misc_feature 1..22: note = HBV-targeting guide sequence portion
  source 1..22: mol_type = other RNA
agcttggaggcttgaacagtag

SEQ ID NO: 13646 - RNA, 22 nt, synthetic construct
  misc_feature 1..22: note = HBV-targeting guide sequence portion
  source 1..22: mol_type = other RNA
aggaaaaccccgcctgtaacac

SEQ ID NO: 13647 - RNA, 22 nt, synthetic construct
  misc_feature 1..22: note = HBV-targeting guide sequence portion
  source 1..22: mol_type = other RNA
aggaaaagagggtgttttccaa

SEQ ID NO: 13648 - RNA, 22 nt, synthetic construct
  misc_feature 1..22: note = HBV-targeting guide sequence portion
  source 1..22: mol_type = other RNA
aggaaagaagtcagaaggcaaa

SEQ ID NO: 13649 - RNA, 22 nt, synthetic construct
  misc_feature 1..22: note = HBV-targeting guide sequence portion
  source 1..22: mol_type = other RNA
aggaacagtaaaccctgttccg

SEQ ID NO: 13650 - RNA, 22 nt, synthetic construct
  misc_feature 1..22: note = HBV-targeting guide sequence portion
  source 1..22: mol_type = other RNA
aggaacctctatgtatccctcc

SEQ ID NO: 13651 - RNA, 22 nt, synthetic construct
  misc_feature 1..22: note = HBV-targeting guide sequence portion
  source 1..22: mol_type = other RNA
aggaagatgataaaacgccgca

SEQ ID NO: 13652 - RNA, 22 nt, synthetic construct
  misc_feature 1..22: note = HBV-targeting guide sequence portion
  source 1..22: mol_type = other RNA
aggaatcctgatgtgatgttct

SEQ ID NO: 13653 - RNA, 22 nt, synthetic construct
  misc_feature 1..22: note = HBV-targeting guide sequence portion
  source 1..22: mol_type = other RNA
aggaattttccgaaagcccagg

SEQ ID NO: 13654 - RNA, 22 nt, synthetic construct
  misc_feature 1..22: note = HBV-targeting guide sequence portion
  source 1..22: mol_type = other RNA
aggacaacagagttgtcagtcc

SEQ ID NO: 13655 - RNA, 22 nt, synthetic construct
  misc_feature 1..22: note = HBV-targeting guide sequence portion
  source 1..22: mol_type = other RNA
aggacaagttggaggacaggag

SEQ ID NO: 13656 - RNA, 22 nt, synthetic construct
  misc_feature 1..22: note = HBV-targeting guide sequence portion
  source 1..22: mol_type = other RNA
aggacagacgggaaacatacct

SEQ ID NO: 13657 - RNA, 22 nt, synthetic construct
  misc_feature 1..22: note = HBV-targeting guide sequence portion
  source 1..22: mol_type = other RNA
aggacaggaggttggtgagtga

SEQ ID NO: 13658 - RNA, 22 nt, synthetic construct
  misc_feature 1..22: note = HBV-targeting guide sequence portion
  source 1..22: mol_type = other RNA
aggacatgaacaagagatgatt

SEQ ID NO: 13659 - RNA, 22 nt, synthetic construct
  misc_feature 1..22: note = HBV-targeting guide sequence portion
  source 1..22: mol_type = other RNA
aggacccctgctcgtgttacag

SEQ ID NO: 13660 - RNA, 22 nt, synthetic construct
  misc_feature 1..22: note = HBV-targeting guide sequence portion
  source 1..22: mol_type = other RNA
aggaccgtttctcttccaaaag

SEQ ID NO: 13661 - RNA, 22 nt, synthetic construct
  misc_feature 1..22: note = HBV-targeting guide sequence portion
  source 1..22: mol_type = other RNA
aggacgacagggccccaagcgg

SEQ ID NO: 13662 - RNA, 22 nt, synthetic construct
  misc_feature 1..22: note = HBV-targeting guide sequence portion
  source 1..22: mol_type = other RNA
aggacggcagcctaccccgctg

SEQ ID NO: 13663 - RNA, 22 nt, synthetic construct
  misc_feature 1..22: note = HBV-targeting guide sequence portion
  source 1..22: mol_type = other RNA
aggacgtcccgcgcaggatcca

SEQ ID NO: 13664 - RNA, 22 nt, synthetic construct
  misc_feature 1..22: note = HBV-targeting guide sequence portion
  source 1..22: mol_type = other RNA
aggactcttggactctctgcaa

SEQ ID NO: 13665 - RNA, 22 nt, synthetic construct
  misc_feature 1..22: note = HBV-targeting guide sequence portion
  source 1..22: mol_type = other RNA
aggagactccaaggcatcccga

SEQ ID NO: 13666 - RNA, 22 nt, synthetic construct
  misc_feature 1..22: note = HBV-targeting guide sequence portion
  source 1..22: mol_type = other RNA
aggagattagattaatgatctt

SEQ ID NO: 13667 - RNA, 22 nt, synthetic construct
  misc_feature 1..22: note = HBV-targeting guide sequence portion
  source 1..22: mol_type = other RNA
aggagccggaaaggttccacgc

SEQ ID NO: 13668 - RNA, 22 nt, synthetic construct
  misc_feature 1..22: note = HBV-targeting guide sequence portion
  source 1..22: mol_type = other RNA
aggagctggagcattcgggcta

SEQ ID NO: 13669 - RNA, 22 nt, synthetic construct
  misc_feature 1..22: note = HBV-targeting guide sequence portion
  source 1..22: mol_type = other RNA
aggaggcggatttgctggcaag

SEQ ID NO: 13670 - RNA, 22 nt, synthetic construct
  misc_feature 1..22: note = HBV-targeting guide sequence portion
  source 1..22: mol_type = other RNA
aggaggctgtaggcataaattg

SEQ ID NO: 13671 - RNA, 22 nt, synthetic construct
  misc_feature 1..22: note = HBV-targeting guide sequence portion
  source 1..22: mol_type = other RNA
aggagggatacatagaggttcc

SEQ ID NO: 13672 - RNA, 22 nt, synthetic construct
  misc_feature 1..22: note = HBV-targeting guide sequence portion
  source 1..22: mol_type = other RNA
aggaggttggtgagtgattgga

SEQ ID NO: 13673 - RNA, 22 nt, synthetic construct
  misc_feature 1..22: note = HBV-targeting guide sequence portion
  source 1..22: mol_type = other RNA
aggagtcgtgcaggttctgcag

SEQ ID NO: 13674 - RNA, 22 nt, synthetic construct
  misc_feature 1..22: note = HBV-targeting guide sequence portion
  source 1..22: mol_type = other RNA
aggagtgcgaatccacactcca

SEQ ID NO: 13675 - RNA, 22 nt, synthetic construct
  misc_feature 1..22: note = HBV-targeting guide sequence portion
  source 1..22: mol_type = other RNA
aggagttccgcagtatggatcg

SEQ ID NO: 13676 - RNA, 22 nt, synthetic construct
  misc_feature 1..22: note = HBV-targeting guide sequence portion
  source 1..22: mol_type = other RNA
aggagttgggggaggagattag

SEQ ID NO: 13677 - RNA, 22 nt, synthetic construct
  misc_feature 1..22: note = HBV-targeting guide sequence portion
  source 1..22: mol_type = other RNA
aggataaaacctagcaggcata

SEQ ID NO: 13678 - RNA, 22 nt, synthetic construct
  misc_feature 1..22: note = HBV-targeting guide sequence portion
  source 1..22: mol_type = other RNA
aggataaccacattgtgtaaaa

SEQ ID NO: 13679 - RNA, 22 nt, synthetic construct
  misc_feature 1..22: note = HBV-targeting guide sequence portion
  source 1..22: mol_type = other RNA
aggataggggcatttggtggtc

SEQ ID NO: 13680 - RNA, 22 nt, synthetic construct
  misc_feature 1..22: note = HBV-targeting guide sequence portion
  source 1..22: mol_type = other RNA
aggatcatcaaccaccagcacg

SEQ ID NO: 13681 - RNA, 22 nt, synthetic construct
  misc_feature 1..22: note = HBV-targeting guide sequence portion
  source 1..22: mol_type = other RNA
aggatccagttggcagcacagc

SEQ ID NO: 13682 - RNA, 22 nt, synthetic construct
  misc_feature 1..22: note = HBV-targeting guide sequence portion
  source 1..22: mol_type = other RNA
aggatccctggccagacgccaa

SEQ ID NO: 13683 - RNA, 22 nt, synthetic construct
  misc_feature 1..22: note = HBV-targeting guide sequence portion
  source 1..22: mol_type = other RNA
aggatgaagaggaagatgataa

SEQ ID NO: 13684 - RNA, 22 nt, synthetic construct
  misc_feature 1..22: note = HBV-targeting guide sequence portion
  source 1..22: mol_type = other RNA
aggatgagtgtttctcagaggt

SEQ ID NO: 13685 - RNA, 22 nt, synthetic construct
  misc_feature 1..22: note = HBV-targeting guide sequence portion
  source 1..22: mol_type = other RNA
aggatgatgggatgggaataca

SEQ ID NO: 13686 - RNA, 22 nt, synthetic construct
  misc_feature 1..22: note = HBV-targeting guide sequence portion
  source 1..22: mol_type = other RNA
aggattcctaggacccctgctc

SEQ ID NO: 13687 - RNA, 22 nt, synthetic construct
  misc_feature 1..22: note = HBV-targeting guide sequence portion
  source 1..22: mol_type = other RNA
aggattcttgtcaacaaggaaa

SEQ ID NO: 13688 - RNA, 22 nt, synthetic construct
  misc_feature 1..22: note = HBV-targeting guide sequence portion
  source 1..22: mol_type = other RNA
aggattgctggtggaaagattc

SEQ ID NO: 13689 - RNA, 22 nt, synthetic construct
  misc_feature 1..22: note = HBV-targeting guide sequence portion
  source 1..22: mol_type = other RNA
aggattggggaccctgcgctga

SEQ ID NO: 13690 - RNA, 22 nt, synthetic construct
  misc_feature 1..22: note = HBV-targeting guide sequence portion
  source 1..22: mol_type = other RNA
aggcaaaaacgagagtaactcc

SEQ ID NO: 13691 - RNA, 22 nt, synthetic construct
  misc_feature 1..22: note = HBV-targeting guide sequence portion
  source 1..22: mol_type = other RNA
aggcaacggccaggtctgtgcc

SEQ ID NO: 13692 - RNA, 22 nt, synthetic construct
  misc_feature 1..22: note = HBV-targeting guide sequence portion
  source 1..22: mol_type = other RNA
aggcaagcaattctttgctggg

SEQ ID NO: 13693 - RNA, 22 nt, synthetic construct
  misc_feature 1..22: note = HBV-targeting guide sequence portion
  source 1..22: mol_type = other RNA
aggcacagacggggagtccgcg

SEQ ID NO: 13694 - RNA, 22 nt, synthetic construct
  misc_feature 1..22: note = HBV-targeting guide sequence portion
  source 1..22: mol_type = other RNA
aggcacagcttggaggcttgaa

SEQ ID NO: 13695 - RNA, 22 nt, synthetic construct
  misc_feature 1..22: note = HBV-targeting guide sequence portion
  source 1..22: mol_type = other RNA
aggcagagaagaggacgacagg

SEQ ID NO: 13696 - RNA, 22 nt, synthetic construct
  misc_feature 1..22: note = HBV-targeting guide sequence portion
  source 1..22: mol_type = other RNA
aggcagaggtgaaaaagttgca

SEQ ID NO: 13697 - RNA, 22 nt, synthetic construct
  misc_feature 1..22: note = HBV-targeting guide sequence portion
  source 1..22: mol_type = other RNA
aggcaggaggcggatttgctgg

SEQ ID NO: 13698 - RNA, 22 nt, synthetic construct
  misc_feature 1..22: note = HBV-targeting guide sequence portion
  source 1..22: mol_type = other RNA
aggcaggtcccctagaagaaga

SEQ ID NO: 13699 - RNA, 22 nt, synthetic construct
  misc_feature 1..22: note = HBV-targeting guide sequence portion
  source 1..22: mol_type = other RNA
aggcagtagtcggaacagggtt

SEQ ID NO: 13700 - RNA, 22 nt, synthetic construct
  misc_feature 1..22: note = HBV-targeting guide sequence portion
  source 1..22: mol_type = other RNA
aggcataaattggtctgcgcac

SEQ ID NO: 13701 - RNA, 22 nt, synthetic construct
  misc_feature 1..22: note = HBV-targeting guide sequence portion
  source 1..22: mol_type = other RNA
aggcataatcaatttcaaccgt

SEQ ID NO: 13702 - RNA, 22 nt, synthetic construct
  misc_feature 1..22: note = HBV-targeting guide sequence portion
  source 1..22: mol_type = other RNA
aggcatacttcaaagactgttt

SEQ ID NO: 13703 - RNA, 22 nt, synthetic construct
  misc_feature 1..22: note = HBV-targeting guide sequence portion
  source 1..22: mol_type = other RNA
aggcatagcagcaggatgaaga

SEQ ID NO: 13704 - RNA, 22 nt, synthetic construct
  misc_feature 1..22: note = HBV-targeting guide sequence portion
  source 1..22: mol_type = other RNA
aggcatcccgatacagagctgc

SEQ ID NO: 13705 - RNA, 22 nt, synthetic construct
  misc_feature 1..22: note = HBV-targeting guide sequence portion
  source 1..22: mol_type = other RNA
aggccatcagcgcatgcgtgga

SEQ ID NO: 13706 - RNA, 22 nt, synthetic construct
  misc_feature 1..22: note = HBV-targeting guide sequence portion
  source 1..22: mol_type = other RNA
aggcccactcccataggaattt

SEQ ID NO: 13707 - RNA, 22 nt, synthetic construct
  misc_feature 1..22: note = HBV-targeting guide sequence portion
  source 1..22: mol_type = other RNA
aggcccatatgagtgttgacat

SEQ ID NO: 13708 - RNA, 22 nt, synthetic construct
  misc_feature 1..22: note = HBV-targeting guide sequence portion
  source 1..22: mol_type = other RNA
aggcccgcttacagttaatgag

SEQ ID NO: 13709 - RNA, 22 nt, synthetic construct
  misc_feature 1..22: note = HBV-targeting guide sequence portion
  source 1..22: mol_type = other RNA
aggccgcttggggccctgtcgt

SEQ ID NO: 13710 - RNA, 22 nt, synthetic construct
  misc_feature 1..22: note = HBV-targeting guide sequence portion
  source 1..22: mol_type = other RNA
aggcctattgattggaaagtgt

SEQ ID NO: 13711 - RNA, 22 nt, synthetic construct
  misc_feature 1..22: note = HBV-targeting guide sequence portion
  source 1..22: mol_type = other RNA
aggcctccgtgcggtggggtga

SEQ ID NO: 13712 - RNA, 22 nt, synthetic construct
  misc_feature 1..22: note = HBV-targeting guide sequence portion
  source 1..22: mol_type = other RNA
aggcctctcactctgggatctt

SEQ ID NO: 13713 - RNA, 22 nt, synthetic construct
  misc_feature 1..22: note = HBV-targeting guide sequence portion
  source 1..22: mol_type = other RNA
aggcctgtatctccctgctggt

SEQ ID NO: 13714 - RNA, 22 nt, synthetic construct
  misc_feature 1..22: note = HBV-targeting guide sequence portion
  source 1..22: mol_type = other RNA
aggcctgttaaccgggagtttt

SEQ ID NO: 13715 - RNA, 22 nt, synthetic construct
  misc_feature 1..22: note = HBV-targeting guide sequence portion
  source 1..22: mol_type = other RNA
aggccttgtaagttggcgaaaa

SEQ ID NO: 13716 - RNA, 22 nt, synthetic construct
  misc_feature 1..22: note = HBV-targeting guide sequence portion
  source 1..22: mol_type = other RNA
aggcctttctgtgtaaacaata

SEQ ID NO: 13717 - RNA, 22 nt, synthetic construct
  misc_feature 1..22: note = HBV-targeting guide sequence portion
  source 1..22: mol_type = other RNA
aggccttttggggtggagccct

SEQ ID NO: 13718 - RNA, 22 nt, synthetic construct
  misc_feature 1..22: note = HBV-targeting guide sequence portion
  source 1..22: mol_type = other RNA
aggcgagggagttcttcttcta

SEQ ID NO: 13719 - RNA, 22 nt, synthetic construct
  misc_feature 1..22: note = HBV-targeting guide sequence portion
  source 1..22: mol_type = other RNA
aggcgctatgtgttgacactct

SEQ ID NO: 13720 - RNA, 22 nt, synthetic construct
  misc_feature 1..22: note = HBV-targeting guide sequence portion
  source 1..22: mol_type = other RNA
aggcggatttgctggcaaggtt

SEQ ID NO: 13721 - RNA, 22 nt, synthetic construct
  misc_feature 1..22: note = HBV-targeting guide sequence portion
  source 1..22: mol_type = other RNA
aggcggggttttccttgttgac

SEQ ID NO: 13722 - RNA, 22 nt, synthetic construct
  misc_feature 1..22: note = HBV-targeting guide sequence portion
  source 1..22: mol_type = other RNA
aggcgggtgttttatataagag

SEQ ID NO: 13723 - RNA, 22 nt, synthetic construct
  misc_feature 1..22: note = HBV-targeting guide sequence portion
  source 1..22: mol_type = other RNA
aggctcagggcataatgcaaac

SEQ ID NO: 13724 - RNA, 22 nt, synthetic construct
  misc_feature 1..22: note = HBV-targeting guide sequence portion
  source 1..22: mol_type = other RNA
aggctgccgtcctgactggcga

SEQ ID NO: 13725 - RNA, 22 nt, synthetic construct
  misc_feature 1..22: note = HBV-targeting guide sequence portion
  source 1..22: mol_type = other RNA
aggctgggtccaactggtggtc

SEQ ID NO: 13726 - RNA, 22 nt, synthetic construct
  misc_feature 1..22: note = HBV-targeting guide sequence portion
  source 1..22: mol_type = other RNA
aggctgtaggcataaattggtc

SEQ ID NO: 13727 - RNA, 22 nt, synthetic construct
  misc_feature 1..22: note = HBV-targeting guide sequence portion
  source 1..22: mol_type = other RNA
aggctgtgctgccaactggatc

SEQ ID NO: 13728 - RNA, 22 nt, synthetic construct
  misc_feature 1..22: note = HBV-targeting guide sequence portion
  source 1..22: mol_type = other RNA
aggcttgaacagtaggacatga

SEQ ID NO: 13729 - RNA, 22 nt, synthetic construct
  misc_feature 1..22: note = HBV-targeting guide sequence portion
  source 1..22: mol_type = other RNA
aggctttcactttttcgccaac

SEQ ID NO: 13730 - RNA, 22 nt, synthetic construct
  misc_feature 1..22: note = HBV-targeting guide sequence portion
  source 1..22: mol_type = other RNA
agggacctagtagtcagttatg

SEQ ID NO: 13731 - RNA, 22 nt, synthetic construct
  misc_feature 1..22: note = HBV-targeting guide sequence portion
  source 1..22: mol_type = other RNA
agggactcaagatgctgtacag

SEQ ID NO: 13732 - RNA, 22 nt, synthetic construct
  misc_feature 1..22: note = HBV-targeting guide sequence portion
  source 1..22: mol_type = other RNA
agggagatacaggcctctcact

SEQ ID NO: 13733 - RNA, 22 nt, synthetic construct
  misc_feature 1..22: note = HBV-targeting guide sequence portion
  source 1..22: mol_type = other RNA
agggagttcttcttctagggga

SEQ ID NO: 13734 - RNA, 22 nt, synthetic construct
  misc_feature 1..22: note = HBV-targeting guide sequence portion
  source 1..22: mol_type = other RNA
agggatacatagaggttccttg

SEQ ID NO: 13735 - RNA, 22 nt, synthetic construct
  misc_feature 1..22: note = HBV-targeting guide sequence portion
  source 1..22: mol_type = other RNA
agggatactaacattgagatcc

SEQ ID NO: 13736 - RNA, 22 nt, synthetic construct
  misc_feature 1..22: note = HBV-targeting guide sequence portion
  source 1..22: mol_type = other RNA
agggatccttgttgggattgaa

SEQ ID NO: 13737 - RNA, 22 nt, synthetic construct
  misc_feature 1..22: note = HBV-targeting guide sequence portion
  source 1..22: mol_type = other RNA
agggcaagtatttggtgaattt

SEQ ID NO: 13738 - RNA, 22 nt, synthetic construct
  misc_feature 1..22: note = HBV-targeting guide sequence portion
  source 1..22: mol_type = other RNA
agggcataatgcaaaccttgcc

SEQ ID NO: 13739 - RNA, 22 nt, synthetic construct
  misc_feature 1..22: note = HBV-targeting guide sequence portion
  source 1..22: mol_type = other RNA
agggcatggacattgacccata

SEQ ID NO: 13740 - RNA, 22 nt, synthetic construct
  misc_feature 1..22: note = HBV-targeting guide sequence portion
  source 1..22: mol_type = other RNA
agggcattaaagcaggataacc

SEQ ID NO: 13741 - RNA, 22 nt, synthetic construct
  misc_feature 1..22: note = HBV-targeting guide sequence portion
  source 1..22: mol_type = other RNA
agggccccaagcggcctcgaga

SEQ ID NO: 13742 - RNA, 22 nt, synthetic construct
  misc_feature 1..22: note = HBV-targeting guide sequence portion
  source 1..22: mol_type = other RNA
agggctccaccccaaaaggcct

SEQ ID NO: 13743 - RNA, 22 nt, synthetic construct
  misc_feature 1..22: note = HBV-targeting guide sequence portion
  source 1..22: mol_type = other RNA
agggctttcccccactgtttgg

SEQ ID NO: 13744 - RNA, 22 nt, synthetic construct
  misc_feature 1..22: note = HBV-targeting guide sequence portion
  source 1..22: mol_type = other RNA
aggggacctgcctcgtcgtcta

SEQ ID NO: 13745 - RNA, 22 nt, synthetic construct
  misc_feature 1..22: note = HBV-targeting guide sequence portion
  source 1..22: mol_type = other RNA
aggggcagcaaaacccagaaga

SEQ ID NO: 13746 - RNA, 22 nt, synthetic construct
  misc_feature 1..22: note = HBV-targeting guide sequence portion
  source 1..22: mol_type = other RNA
aggggcatttggtggtctataa

SEQ ID NO: 13747 - RNA, 22 nt, synthetic construct
  misc_feature 1..22: note = HBV-targeting guide sequence portion
  source 1..22: mol_type = other RNA
agggggaactaccgtgtgtctt

SEQ ID NO: 13748 - RNA, 22 nt, synthetic construct
  misc_feature 1..22: note = HBV-targeting guide sequence portion
  source 1..22: mol_type = other RNA
aggggtcctaggaatcctgatg

SEQ ID NO: 13749 - RNA, 22 nt, synthetic construct
  misc_feature 1..22: note = HBV-targeting guide sequence portion
  source 1..22: mol_type = other RNA
agggtattaaaccttattatcc

SEQ ID NO: 13750 - RNA, 22 nt, synthetic construct
  misc_feature 1..22: note = HBV-targeting guide sequence portion
  source 1..22: mol_type = other RNA
agggtccccaatcctcgagaag

SEQ ID NO: 13751 - RNA, 22 nt, synthetic construct
  misc_feature 1..22: note = HBV-targeting guide sequence portion
  source 1..22: mol_type = other RNA
agggtcccgtgctggtggttga

SEQ ID NO: 13752 - RNA, 22 nt, synthetic construct
  misc_feature 1..22: note = HBV-targeting guide sequence portion
  source 1..22: mol_type = other RNA
agggtgttttccaatgagggtt

SEQ ID NO: 13753 - RNA, 22 nt, synthetic construct
  misc_feature 1..22: note = HBV-targeting guide sequence portion
  source 1..22: mol_type = other RNA
agggttaaagacaggtacagta

SEQ ID NO: 13754 - RNA, 22 nt, synthetic construct
  misc_feature 1..22: note = HBV-targeting guide sequence portion
  source 1..22: mol_type = other RNA
agggttcaccccaccgcacgga

SEQ ID NO: 13755 - RNA, 22 nt, synthetic construct
  misc_feature 1..22: note = HBV-targeting guide sequence portion
  source 1..22: mol_type = other RNA
agggtttaaatgtacacccaaa

SEQ ID NO: 13756 - RNA, 22 nt, synthetic construct
  misc_feature 1..22: note = HBV-targeting guide sequence portion
  source 1..22: mol_type = other RNA
agggtttactgttcctgaactg

SEQ ID NO: 13757 - RNA, 22 nt, synthetic construct
  misc_feature 1..22: note = HBV-targeting guide sequence portion
  source 1..22: mol_type = other RNA
aggtacagtagaagaataaagc

SEQ ID NO: 13758 - RNA, 22 nt, synthetic construct
  misc_feature 1..22: note = HBV-targeting guide sequence portion
  source 1..22: mol_type = other RNA
aggtagctagagtcattagttc

SEQ ID NO: 13759 - RNA, 22 nt, synthetic construct
  misc_feature 1..22: note = HBV-targeting guide sequence portion
  source 1..22: mol_type = other RNA
aggtaggagctggagcattcgg

SEQ ID NO: 13760 - RNA, 22 nt, synthetic construct
  misc_feature 1..22: note = HBV-targeting guide sequence portion
  source 1..22: mol_type = other RNA
aggtatgtttcccgtctgtcct

SEQ ID NO: 13761 - RNA, 22 nt, synthetic construct
  misc_feature 1..22: note = HBV-targeting guide sequence portion
  source 1..22: mol_type = other RNA
aggtattgtttacacagaaagg

SEQ ID NO: 13762 - RNA, 22 nt, synthetic construct
  misc_feature 1..22: note = HBV-targeting guide sequence portion
  source 1..22: mol_type = other RNA
aggtcccctagaagaagaactc

SEQ ID NO: 13763 - RNA, 22 nt, synthetic construct
  misc_feature 1..22: note = HBV-targeting guide sequence portion
  source 1..22: mol_type = other RNA
aggtccctagatgcttgatctt

SEQ ID NO: 13764 - RNA, 22 nt, synthetic construct
  misc_feature 1..22: note = HBV-targeting guide sequence portion
  source 1..22: mol_type = other RNA
aggtcggtcgttgacattgcag

SEQ ID NO: 13765 - RNA, 22 nt, synthetic construct
  misc_feature 1..22: note = HBV-targeting guide sequence portion
  source 1..22: mol_type = other RNA
aggtctgtgccaagtgtttgct

SEQ ID NO: 13766 - RNA, 22 nt, synthetic construct
  misc_feature 1..22: note = HBV-targeting guide sequence portion
  source 1..22: mol_type = other RNA
aggtcttacataagaggactct

SEQ ID NO: 13767 - RNA, 22 nt, synthetic construct
  misc_feature 1..22: note = HBV-targeting guide sequence portion
  source 1..22: mol_type = other RNA
aggtgaaaaagttgcatggtgc

SEQ ID NO: 13768 - RNA, 22 nt, synthetic construct
  misc_feature 1..22: note = HBV-targeting guide sequence portion
  source 1..22: mol_type = other RNA
aggtgaacaatgctcaggagac

SEQ ID NO: 13769 - RNA, 22 nt, synthetic construct
  misc_feature 1..22: note = HBV-targeting guide sequence portion
  source 1..22: mol_type = other RNA
aggtgaagcgaagtgcacacgg

SEQ ID NO: 13770 - RNA, 22 nt, synthetic construct
  misc_feature 1..22: note = HBV-targeting guide sequence portion
  source 1..22: mol_type = other RNA
aggtgcagtttccatccgaagg

SEQ ID NO: 13771 - RNA, 22 nt, synthetic construct
  misc_feature 1..22: note = HBV-targeting guide sequence portion
  source 1..22: mol_type = other RNA
aggtgcgccccgtggtcggtcg

SEQ ID NO: 13772 - RNA, 22 nt, synthetic construct
  misc_feature 1..22: note = HBV-targeting guide sequence portion
  source 1..22: mol_type = other RNA
aggtggagacagcggggtaggc

SEQ ID NO: 13773 - RNA, 22 nt, synthetic construct
  misc_feature 1..22: note = HBV-targeting guide sequence portion
  source 1..22: mol_type = other RNA
aggtgggaaattttacggggct

SEQ ID NO: 13774 - RNA, 22 nt, synthetic construct
  misc_feature 1..22: note = HBV-targeting guide sequence portion
  source 1..22: mol_type = other RNA
aggttcaggtattgtttacaca

SEQ ID NO: 13775 - RNA, 22 nt, synthetic construct
  misc_feature 1..22: note = HBV-targeting guide sequence portion
  source 1..22: mol_type = other RNA
aggttccacgcatgcgctgatg

SEQ ID NO: 13776 - RNA, 22 nt, synthetic construct
  misc_feature 1..22: note = HBV-targeting guide sequence portion
  source 1..22: mol_type = other RNA
aggttccttgagcaggagtcgt

SEQ ID NO: 13777 - RNA, 22 nt, synthetic construct
  misc_feature 1..22: note = HBV-targeting guide sequence portion
  source 1..22: mol_type = other RNA
aggttctgcagggtcccgtgct

SEQ ID NO: 13778 - RNA, 22 nt, synthetic construct
  misc_feature 1..22: note = HBV-targeting guide sequence portion
  source 1..22: mol_type = other RNA
aggttggggactgcgaattttg

SEQ ID NO: 13779 - RNA, 22 nt, synthetic construct
  misc_feature 1..22: note = HBV-targeting guide sequence portion
  source 1..22: mol_type = other RNA
aggttggtgagtgattggaggt

SEQ ID NO: 13780 - RNA, 22 nt, synthetic construct
  misc_feature 1..22: note = HBV-targeting guide sequence portion
  source 1..22: mol_type = other RNA
aggtttaatacccttatccaag

SEQ ID NO: 13781 - RNA, 22 nt, synthetic construct
  misc_feature 1..22: note = HBV-targeting guide sequence portion
  source 1..22: mol_type = other RNA
aggtttgcattatgccctgagc

SEQ ID NO: 13782 - RNA, 22 nt, synthetic construct
  misc_feature 1..22: note = HBV-targeting guide sequence portion
  source 1..22: mol_type = other RNA
aggttttatcctaaattcacca

SEQ ID NO: 13783 - RNA, 22 nt, synthetic construct
  misc_feature 1..22: note = HBV-targeting guide sequence portion
  source 1..22: mol_type = other RNA
aggttttgtacagcaacaggag

SEQ ID NO: 13784 - RNA, 22 nt, synthetic construct
  misc_feature 1..22: note = HBV-targeting guide sequence portion
  source 1..22: mol_type = other RNA
agtaaaccctgttccgactact

SEQ ID NO: 13785 - RNA, 22 nt, synthetic construct
  misc_feature 1..22: note = HBV-targeting guide sequence portion
  source 1..22: mol_type = other RNA
agtaaactgagccaagagaaac

SEQ ID NO: 13786 - RNA, 22 nt, synthetic construct
  misc_feature 1..22: note = HBV-targeting guide sequence portion
  source 1..22: mol_type = other RNA
agtaactccacagtagctccaa

SEQ ID NO: 13787 - RNA, 22 nt, synthetic construct
  misc_feature 1..22: note = HBV-targeting guide sequence portion
  source 1..22: mol_type = other RNA
agtaagacaagaaatgtgaaac

SEQ ID NO: 13788 - RNA, 22 nt, synthetic construct
  misc_feature 1..22: note = HBV-targeting guide sequence portion
  source 1..22: mol_type = other RNA
agtaatgattaactagatgttc

SEQ ID NO: 13789 - RNA, 22 nt, synthetic construct
  misc_feature 1..22: note = HBV-targeting guide sequence portion
  source 1..22: mol_type = other RNA
agtacaaagatcattaatctaa

SEQ ID NO: 13790 - RNA, 22 nt, synthetic construct
  misc_feature 1..22: note = HBV-targeting guide sequence portion
  source 1..22: mol_type = other RNA
agtacccacccaggtagctaga

SEQ ID NO: 13791 - RNA, 22 nt, synthetic construct
  misc_feature 1..22: note = HBV-targeting guide sequence portion
  source 1..22: mol_type = other RNA
agtagaagaataaagccccgta

SEQ ID NO: 13792 - RNA, 22 nt, synthetic construct
  misc_feature 1..22: note = HBV-targeting guide sequence portion
  source 1..22: mol_type = other RNA
agtagctccaaattctttatat

SEQ ID NO: 13793 - RNA, 22 nt, synthetic construct
  misc_feature 1..22: note = HBV-targeting guide sequence portion
  source 1..22: mol_type = other RNA
agtaggacatgaacaagagatg

SEQ ID NO: 13794 - RNA, 22 nt, synthetic construct
  misc_feature 1..22: note = HBV-targeting guide sequence portion
  source 1..22: mol_type = other RNA
agtagtcagttatgtcaacact

SEQ ID NO: 13795 - RNA, 22 nt, synthetic construct
  misc_feature 1..22: note = HBV-targeting guide sequence portion
  source 1..22: mol_type = other RNA
agtagtcggaacagggtttact

SEQ ID NO: 13796 - RNA, 22 nt, synthetic construct
  misc_feature 1..22: note = HBV-targeting guide sequence portion
  source 1..22: mol_type = other RNA
agtatcccttggactcataagg

SEQ ID NO: 13797 - RNA, 22 nt, synthetic construct
  misc_feature 1..22: note = HBV-targeting guide sequence portion
  source 1..22: mol_type = other RNA
agtatgcctcaaggtcggtcgt

SEQ ID NO: 13798 - RNA, 22 nt, synthetic construct
  misc_feature 1..22: note = HBV-targeting guide sequence portion
  source 1..22: mol_type = other RNA
agtatggatcggcagaggagcc

SEQ ID NO: 13799 - RNA, 22 nt, synthetic construct
  misc_feature 1..22: note = HBV-targeting guide sequence portion
  source 1..22: mol_type = other RNA
agtatggtgaggtgaacaatgc

SEQ ID NO: 13800 - RNA, 22 nt, synthetic construct
  misc_feature 1..22: note = HBV-targeting guide sequence portion
  source 1..22: mol_type = other RNA
agtatttggtgaatttaggata

SEQ ID NO: 13801 - RNA, 22 nt, synthetic construct
  misc_feature 1..22: note = HBV-targeting guide sequence portion
  source 1..22: mol_type = other RNA
agtatttggtgtcttttggagt

SEQ ID NO: 13802 - RNA, 22 nt, synthetic construct
  misc_feature 1..22: note = HBV-targeting guide sequence portion
  source 1..22: mol_type = other RNA
agtcagaaggcaaaaacgagag

SEQ ID NO: 13803 - RNA, 22 nt, synthetic construct
  misc_feature 1..22: note = HBV-targeting guide sequence portion
  source 1..22: mol_type = other RNA
agtcaggacggcagcctacccc

SEQ ID NO: 13804 - RNA, 22 nt, synthetic construct
  misc_feature 1..22: note = HBV-targeting guide sequence portion
  source 1..22: mol_type = other RNA
agtcagttatgtcaacactcat

SEQ ID NO: 13805 - RNA, 22 nt, synthetic construct
  misc_feature 1..22: note = HBV-targeting guide sequence portion
  source 1..22: mol_type = other RNA
agtcattagttctccccagcaa

SEQ ID NO: 13806 - RNA, 22 nt, synthetic construct
  misc_feature 1..22: note = HBV-targeting guide sequence portion
  source 1..22: mol_type = other RNA
agtccaagagtcctcttatgta

SEQ ID NO: 13807 - RNA, 22 nt, synthetic construct
  misc_feature 1..22: note = HBV-targeting guide sequence portion
  source 1..22: mol_type = other RNA
agtccaagggatactaacattg

SEQ ID NO: 13808 - RNA, 22 nt, synthetic construct
  misc_feature 1..22: note = HBV-targeting guide sequence portion
  source 1..22: mol_type = other RNA
agtccaccacgagtctagactc

SEQ ID NO: 13809 - RNA, 22 nt, synthetic construct
  misc_feature 1..22: note = HBV-targeting guide sequence portion
  source 1..22: mol_type = other RNA
agtccagaagaaccaacaagaa

SEQ ID NO: 13810 - RNA, 22 nt, synthetic construct
  misc_feature 1..22: note = HBV-targeting guide sequence portion
  source 1..22: mol_type = other RNA
agtcccaatctggattgttgga

SEQ ID NO: 13811 - RNA, 22 nt, synthetic construct
  misc_feature 1..22: note = HBV-targeting guide sequence portion
  source 1..22: mol_type = other RNA
agtccccaacctccaatcactc

SEQ ID NO: 13812 - RNA, 22 nt, synthetic construct
  misc_feature 1..22: note = HBV-targeting guide sequence portion
  source 1..22: mol_type = other RNA
agtcccgagaatgtttgctcca

SEQ ID NO: 13813 - RNA, 22 nt, synthetic construct
  misc_feature 1..22: note = HBV-targeting guide sequence portion
  source 1..22: mol_type = other RNA
agtccctttataccgctgttac

SEQ ID NO: 13814 - RNA, 22 nt, synthetic construct
  misc_feature 1..22: note = HBV-targeting guide sequence portion
  source 1..22: mol_type = other RNA
agtccgcgtaaagagaggtgcg

SEQ ID NO: 13815 - RNA, 22 nt, synthetic construct
  misc_feature 1..22: note = HBV-targeting guide sequence portion
  source 1..22: mol_type = other RNA
agtcctcttatgtaagaccttg

SEQ ID NO: 13816 - RNA, 22 nt, synthetic construct
  misc_feature 1..22: note = HBV-targeting guide sequence portion
  source 1..22: mol_type = other RNA
agtcggaacagggtttactgtt

SEQ ID NO: 13817 - RNA, 22 nt, synthetic construct
  misc_feature 1..22: note = HBV-targeting guide sequence portion
  source 1..22: mol_type = other RNA
agtcgtgcaggttctgcagggt

SEQ ID NO: 13818 - RNA, 22 nt, synthetic construct
  misc_feature 1..22: note = HBV-targeting guide sequence portion
  source 1..22: mol_type = other RNA
agtctagactcgtggtggactt

SEQ ID NO: 13819 - RNA, 22 nt, synthetic construct
  misc_feature 1..22: note = HBV-targeting guide sequence portion
  source 1..22: mol_type = other RNA
agtctagactctgcggtattgt

SEQ ID NO: 13820 - RNA, 22 nt, synthetic construct
  misc_feature 1..22: note = HBV-targeting guide sequence portion
  source 1..22: mol_type = other RNA
agtctccggaagtgttgatagg

SEQ ID NO: 13821 - RNA, 22 nt, synthetic construct
  misc_feature 1..22: note = HBV-targeting guide sequence portion
  source 1..22: mol_type = other RNA
agtctcctgagcattgttcacc

SEQ ID NO: 13822 - RNA, 22 nt, synthetic construct
  misc_feature 1..22: note = HBV-targeting guide sequence portion
  source 1..22: mol_type = other RNA
agtctgtacagcatcttgagtc

SEQ ID NO: 13823 - RNA, 22 nt, synthetic construct
  misc_feature 1..22: note = HBV-targeting guide sequence portion
  source 1..22: mol_type = other RNA
agtctttaaacaaacagtcttt

SEQ ID NO: 13824 - RNA, 22 nt, synthetic construct
  misc_feature 1..22: note = HBV-targeting guide sequence portion
  source 1..22: mol_type = other RNA
agtctttgaagtatgcctcaag

SEQ ID NO: 13825 - RNA, 22 nt, synthetic construct
  misc_feature 1..22: note = HBV-targeting guide sequence portion
  source 1..22: mol_type = other RNA
agtgaaagcctgcttagattga

SEQ ID NO: 13826 - RNA, 22 nt, synthetic construct
  misc_feature 1..22: note = HBV-targeting guide sequence portion
  source 1..22: mol_type = other RNA
agtgagaggcctgtatctccct

SEQ ID NO: 13827 - RNA, 22 nt, synthetic construct
  misc_feature 1..22: note = HBV-targeting guide sequence portion
  source 1..22: mol_type = other RNA
agtgattggaggttggggactg

SEQ ID NO: 13828 - RNA, 22 nt, synthetic construct
  misc_feature 1..22: note = HBV-targeting guide sequence portion
  source 1..22: mol_type = other RNA
agtgcacacggtccggcagatg

SEQ ID NO: 13829 - RNA, 22 nt, synthetic construct
  misc_feature 1..22: note = HBV-targeting guide sequence portion
  source 1..22: mol_type = other RNA
agtgcagtatggtgaggtgaac

SEQ ID NO: 13830 - RNA, 22 nt, synthetic construct
  misc_feature 1..22: note = HBV-targeting guide sequence portion
  source 1..22: mol_type = other RNA
agtgccatttgttcagtggttc

SEQ ID NO: 13831 - RNA, 22 nt, synthetic construct
  misc_feature 1..22: note = HBV-targeting guide sequence portion
  source 1..22: mol_type = other RNA
agtgcgaatccacactccaaaa

SEQ ID NO: 13832 - RNA, 22 nt, synthetic construct
  misc_feature 1..22: note = HBV-targeting guide sequence portion
  source 1..22: mol_type = other RNA
agtgggcctcagcccgtttctc

SEQ ID NO: 13833 - RNA, 22 nt, synthetic construct
  misc_feature 1..22: note = HBV-targeting guide sequence portion
  source 1..22: mol_type = other RNA
agtgggggaaagccctacgaac

SEQ ID NO: 13834 - RNA, 22 nt, synthetic construct
  misc_feature 1..22: note = HBV-targeting guide sequence portion
  source 1..22: mol_type = other RNA
agtgggggttgcatcagcaaac

SEQ ID NO: 13835 - RNA, 22 nt, synthetic construct
  misc_feature 1..22: note = HBV-targeting guide sequence portion
  source 1..22: mol_type = other RNA
agtggttcgtagggctttcccc

SEQ ID NO: 13836 - RNA, 22 nt, synthetic construct
  misc_feature 1..22: note = HBV-targeting guide sequence portion
  source 1..22: mol_type = other RNA
agtgtcaacacatagcgcctca

SEQ ID NO: 13837 - RNA, 22 nt, synthetic construct
  misc_feature 1..22: note = HBV-targeting guide sequence portion
  source 1..22: mol_type = other RNA
agtgtctagtttggaagtaatg

SEQ ID NO: 13838 - RNA, 22 nt, synthetic construct
  misc_feature 1..22: note = HBV-targeting guide sequence portion
  source 1..22: mol_type = other RNA
agtgtggattcgcactcctcca

SEQ ID NO: 13839 - RNA, 22 nt, synthetic construct
  misc_feature 1..22: note = HBV-targeting guide sequence portion
  source 1..22: mol_type = other RNA
agtgtgtaaatagtgtctagtt

SEQ ID NO: 13840 - RNA, 22 nt, synthetic construct
  misc_feature 1..22: note = HBV-targeting guide sequence portion
  source 1..22: mol_type = other RNA
agtgtgtcaacgaattgtgggt

SEQ ID NO: 13841 - RNA, 22 nt, synthetic construct
  misc_feature 1..22: note = HBV-targeting guide sequence portion
  source 1..22: mol_type = other RNA
agtgttgacataactgactact

SEQ ID NO: 13842 - RNA, 22 nt, synthetic construct
  misc_feature 1..22: note = HBV-targeting guide sequence portion
  source 1..22: mol_type = other RNA
agtgttgataggataggggcat

SEQ ID NO: 13843 - RNA, 22 nt, synthetic construct
  misc_feature 1..22: note = HBV-targeting guide sequence portion
  source 1..22: mol_type = other RNA
agtgtttctcagaggtggagac

SEQ ID NO: 13844 - RNA, 22 nt, synthetic construct
  misc_feature 1..22: note = HBV-targeting guide sequence portion
  source 1..22: mol_type = other RNA
agtgtttgctgatgcaaccccc

SEQ ID NO: 13845 - RNA, 22 nt, synthetic construct
  misc_feature 1..22: note = HBV-targeting guide sequence portion
  source 1..22: mol_type = other RNA
agttaatcattacttccaaact

SEQ ID NO: 13846 - RNA, 22 nt, synthetic construct
  misc_feature 1..22: note = HBV-targeting guide sequence portion
  source 1..22: mol_type = other RNA
agttaatgagaaaagacggttg

SEQ ID NO: 13847 - RNA, 22 nt, synthetic construct
  misc_feature 1..22: note = HBV-targeting guide sequence portion
  source 1..22: mol_type = other RNA
agttactctcgtttttgccttc

SEQ ID NO: 13848 - RNA, 22 nt, synthetic construct
  misc_feature 1..22: note = HBV-targeting guide sequence portion
  source 1..22: mol_type = other RNA
agttatatggatgatgtggtat

SEQ ID NO: 13849 - RNA, 22 nt, synthetic construct
  misc_feature 1..22: note = HBV-targeting guide sequence portion
  source 1..22: mol_type = other RNA
agttatgtcaacactcatatgg

SEQ ID NO: 13850 - RNA, 22 nt, synthetic construct
  misc_feature 1..22: note = HBV-targeting guide sequence portion
  source 1..22: mol_type = other RNA
agttcagacaactattgtggtt

SEQ ID NO: 13851 - RNA, 22 nt, synthetic construct
  misc_feature 1..22: note = HBV-targeting guide sequence portion
  source 1..22: mol_type = other RNA
agttcaggaacagtaaaccctg

SEQ ID NO: 13852 - RNA, 22 nt, synthetic construct
  misc_feature 1..22: note = HBV-targeting guide sequence portion
  source 1..22: mol_type = other RNA
agttccccctagaaaattgaga

SEQ ID NO: 13853 - RNA, 22 nt, synthetic construct
  misc_feature 1..22: note = HBV-targeting guide sequence portion
  source 1..22: mol_type = other RNA
agttccgcagtatggatcggca

SEQ ID NO: 13854 - RNA, 22 nt, synthetic construct
  misc_feature 1..22: note = HBV-targeting guide sequence portion
  source 1..22: mol_type = other RNA
agttctccccagcaaagaattg

SEQ ID NO: 13855 - RNA, 22 nt, synthetic construct
  misc_feature 1..22: note = HBV-targeting guide sequence portion
  source 1..22: mol_type = other RNA
agttcttcttctaggggacctg

SEQ ID NO: 13856 - RNA, 22 nt, synthetic construct
  misc_feature 1..22: note = HBV-targeting guide sequence portion
  source 1..22: mol_type = other RNA
agttgcatggtgctggtgcgca

SEQ ID NO: 13857 - RNA, 22 nt, synthetic construct
  misc_feature 1..22: note = HBV-targeting guide sequence portion
  source 1..22: mol_type = other RNA
agttggacccagccttcagagc

SEQ ID NO: 13858 - RNA, 22 nt, synthetic construct
  misc_feature 1..22: note = HBV-targeting guide sequence portion
  source 1..22: mol_type = other RNA
agttggaggacaggaggttggt

SEQ ID NO: 13859 - RNA, 22 nt, synthetic construct
  misc_feature 1..22: note = HBV-targeting guide sequence portion
  source 1..22: mol_type = other RNA
agttggcagcacagcctagcag

SEQ ID NO: 13860 - RNA, 22 nt, synthetic construct
  misc_feature 1..22: note = HBV-targeting guide sequence portion
  source 1..22: mol_type = other RNA
agttggcgaaaaagtgaaagcc

SEQ ID NO: 13861 - RNA, 22 nt, synthetic construct
  misc_feature 1..22: note = HBV-targeting guide sequence portion
  source 1..22: mol_type = other RNA
agttgggggaggagattagatt

SEQ ID NO: 13862 - RNA, 22 nt, synthetic construct
  misc_feature 1..22: note = HBV-targeting guide sequence portion
  source 1..22: mol_type = other RNA
agttgtcagtcccgagaatgtt

SEQ ID NO: 13863 - RNA, 22 nt, synthetic construct
  misc_feature 1..22: note = HBV-targeting guide sequence portion
  source 1..22: mol_type = other RNA
agttgtctgaactttaggccca

SEQ ID NO: 13864 - RNA, 22 nt, synthetic construct
  misc_feature 1..22: note = HBV-targeting guide sequence portion
  source 1..22: mol_type = other RNA
agtttactagtgccatttgttc

SEQ ID NO: 13865 - RNA, 22 nt, synthetic construct
  misc_feature 1..22: note = HBV-targeting guide sequence portion
  source 1..22: mol_type = other RNA
agtttccatccgaaggttttgt

SEQ ID NO: 13866 - RNA, 22 nt, synthetic construct
  misc_feature 1..22: note = HBV-targeting guide sequence portion
  source 1..22: mol_type = other RNA
agtttgctctgaaggctgggtc

SEQ ID NO: 13867 - RNA, 22 nt, synthetic construct
  misc_feature 1..22: note = HBV-targeting guide sequence portion
  source 1..22: mol_type = other RNA
agtttggaagtaatgattaact

SEQ ID NO: 13868 - RNA, 22 nt, synthetic construct
  misc_feature 1..22: note = HBV-targeting guide sequence portion
  source 1..22: mol_type = other RNA
agtttgtaggcccgcttacagt

SEQ ID NO: 13869 - RNA, 22 nt, synthetic construct
  misc_feature 1..22: note = HBV-targeting guide sequence portion
  source 1..22: mol_type = other RNA
agttttctgaaacattctttga

SEQ ID NO: 13870 - RNA, 22 nt, synthetic construct
  misc_feature 1..22: note = HBV-targeting guide sequence portion
  source 1..22: mol_type = other RNA
ataaaacacccgccttccatag

SEQ ID NO: 13871 - RNA, 22 nt, synthetic construct
  misc_feature 1..22: note = HBV-targeting guide sequence portion
  source 1..22: mol_type = other RNA
ataaaacctagcaggcataatc

SEQ ID NO: 13872 - RNA, 22 nt, synthetic construct
  misc_feature 1..22: note = HBV-targeting guide sequence portion
  source 1..22: mol_type = other RNA
ataaaacgccgcagacacatcc

SEQ ID NO: 13873 - RNA, 22 nt, synthetic construct
  misc_feature 1..22: note = HBV-targeting guide sequence portion
  source 1..22: mol_type = other RNA
ataaagaatttggagctactgt

SEQ ID NO: 13874 - RNA, 22 nt, synthetic construct
  misc_feature 1..22: note = HBV-targeting guide sequence portion
  source 1..22: mol_type = other RNA
ataaagccccgtaaaatttccc

SEQ ID NO: 13875 - RNA, 22 nt, synthetic construct
  misc_feature 1..22: note = HBV-targeting guide sequence portion
  source 1..22: mol_type = other RNA
ataaagggactcaagatgctgt

SEQ ID NO: 13876 - RNA, 22 nt, synthetic construct
  misc_feature 1..22: note = HBV-targeting guide sequence portion
  source 1..22: mol_type = other RNA
ataaattggtctgcgcaccagc

SEQ ID NO: 13877 - RNA, 22 nt, synthetic construct
  misc_feature 1..22: note = HBV-targeting guide sequence portion
  source 1..22: mol_type = other RNA
ataaccacattgtgtaaaaggg

SEQ ID NO: 13878 - RNA, 22 nt, synthetic construct
  misc_feature 1..22: note = HBV-targeting guide sequence portion
  source 1..22: mol_type = other RNA
ataaccaggacaagttggagga

SEQ ID NO: 13879 - RNA, 22 nt, synthetic construct
  misc_feature 1..22: note = HBV-targeting guide sequence portion
  source 1..22: mol_type = other RNA
ataaccccatctctttgttttg

SEQ ID NO: 13880 - RNA, 22 nt, synthetic construct
  misc_feature 1..22: note = HBV-targeting guide sequence portion
  source 1..22: mol_type = other RNA
ataactgaaagccaaacagtgg

SEQ ID NO: 13881 - RNA, 22 nt, synthetic construct
  misc_feature 1..22: note = HBV-targeting guide sequence portion
  source 1..22: mol_type = other RNA
ataactgactactaggtcccta

SEQ ID NO: 13882 - RNA, 22 nt, synthetic construct
  misc_feature 1..22: note = HBV-targeting guide sequence portion
  source 1..22: mol_type = other RNA
ataagagagtgtcaacacatag

SEQ ID NO: 13883 - RNA, 22 nt, synthetic construct
  misc_feature 1..22: note = HBV-targeting guide sequence portion
  source 1..22: mol_type = other RNA
ataagaggactcttggactctc

SEQ ID NO: 13884 - RNA, 22 nt, synthetic construct
  misc_feature 1..22: note = HBV-targeting guide sequence portion
  source 1..22: mol_type = other RNA
ataagctggaggagtgcgaatc

SEQ ID NO: 13885 - RNA, 22 nt, synthetic construct
  misc_feature 1..22: note = HBV-targeting guide sequence portion
  source 1..22: mol_type = other RNA
ataagggtattaaaccttatta

SEQ ID NO: 13886 - RNA, 22 nt, synthetic construct
  misc_feature 1..22: note = HBV-targeting guide sequence portion
  source 1..22: mol_type = other RNA
ataaggtgggaaattttacggg

SEQ ID NO: 13887 - RNA, 22 nt, synthetic construct
  misc_feature 1..22: note = HBV-targeting guide sequence portion
  source 1..22: mol_type = other RNA
ataaggtttaatacccttatcc

SEQ ID NO: 13888 - RNA, 22 nt, synthetic construct
  misc_feature 1..22: note = HBV-targeting guide sequence portion
  source 1..22: mol_type = other RNA
ataataaggtttaataccctta

SEQ ID NO: 13889 - RNA, 22 nt, synthetic construct
  misc_feature 1..22: note = HBV-targeting guide sequence portion
  source 1..22: mol_type = other RNA
ataatatcttggtgtagatgta

SEQ ID NO: 13890 - RNA, 22 nt, synthetic construct
  misc_feature 1..22: note = HBV-targeting guide sequence portion
  source 1..22: mol_type = other RNA
ataatcaatttcaaccgtcttt

SEQ ID NO: 13891 - RNA, 22 nt, synthetic construct
  misc_feature 1..22: note = HBV-targeting guide sequence portion
  source 1..22: mol_type = other RNA
ataatgcaaaccttgccagcaa

SEQ ID NO: 13892 - RNA, 22 nt, synthetic construct
  misc_feature 1..22: note = HBV-targeting guide sequence portion
  source 1..22: mol_type = other RNA
atacaagggcattaaagcagga

SEQ ID NO: 13893 - RNA, 22 nt, synthetic construct
  misc_feature 1..22: note = HBV-targeting guide sequence portion
  source 1..22: mol_type = other RNA
atacacaaaatcaaagaatgtt

SEQ ID NO: 13894 - RNA, 22 nt, synthetic construct
  misc_feature 1..22: note = HBV-targeting guide sequence portion
  source 1..22: mol_type = other RNA
atacagagctgcggcggtatct

SEQ ID NO: 13895 - RNA, 22 nt, synthetic construct
  misc_feature 1..22: note = HBV-targeting guide sequence portion
  source 1..22: mol_type = other RNA
atacaggcctctcactctggga

SEQ ID NO: 13896 - RNA, 22 nt, synthetic construct
  misc_feature 1..22: note = HBV-targeting guide sequence portion
  source 1..22: mol_type = other RNA
atacaggtgcagtttccatccg

SEQ ID NO: 13897 - RNA, 22 nt, synthetic construct
  misc_feature 1..22: note = HBV-targeting guide sequence portion
  source 1..22: mol_type = other RNA
atacatagaggttccttgagca

SEQ ID NO: 13898 - RNA, 22 nt, synthetic construct
  misc_feature 1..22: note = HBV-targeting guide sequence portion
  source 1..22: mol_type = other RNA
atacatcgttcccatggctgct

SEQ ID NO: 13899 - RNA, 22 nt, synthetic construct
  misc_feature 1..22: note = HBV-targeting guide sequence portion
  source 1..22: mol_type = other RNA
atacatctacaccaagatatta

SEQ ID NO: 13900 - RNA, 22 nt, synthetic construct
  misc_feature 1..22: note = HBV-targeting guide sequence portion
  source 1..22: mol_type = other RNA
atacatgcatacaagggcatta

SEQ ID NO: 13901 - RNA, 22 nt, synthetic construct
  misc_feature 1..22: note = HBV-targeting guide sequence portion
  source 1..22: mol_type = other RNA
ataccacatcatccatataact

SEQ ID NO: 13902 - RNA, 22 nt, synthetic construct
  misc_feature 1..22: note = HBV-targeting guide sequence portion
  source 1..22: mol_type = other RNA
atacccttatccaagggcaagt

SEQ ID NO: 13903 - RNA, 22 nt, synthetic construct
  misc_feature 1..22: note = HBV-targeting guide sequence portion
  source 1..22: mol_type = other RNA
ataccgcagagtctagactcgt

SEQ ID NO: 13904 - RNA, 22 nt, synthetic construct
  misc_feature 1..22: note = HBV-targeting guide sequence portion
  source 1..22: mol_type = other RNA
ataccgccgcagctctgtatcg

SEQ ID NO: 13905 - RNA, 22 nt, synthetic construct
  misc_feature 1..22: note = HBV-targeting guide sequence portion
  source 1..22: mol_type = other RNA
ataccgctgttaccaattttct

SEQ ID NO: 13906 - RNA, 22 nt, synthetic construct
  misc_feature 1..22: note = HBV-targeting guide sequence portion
  source 1..22: mol_type = other RNA
atacctgaacctttaccccgtt

SEQ ID NO: 13907 - RNA, 22 nt, synthetic construct
  misc_feature 1..22: note = HBV-targeting guide sequence portion
  source 1..22: mol_type = other RNA
ataccttgatagtccagaagaa

SEQ ID NO: 13908 - RNA, 22 nt, synthetic construct
  misc_feature 1..22: note = HBV-targeting guide sequence portion
  source 1..22: mol_type = other RNA
atactaacattgagatccccga

SEQ ID NO: 13909 - RNA, 22 nt, synthetic construct
  misc_feature 1..22: note = HBV-targeting guide sequence portion
  source 1..22: mol_type = other RNA
atactctaggaccgtttctctt

SEQ ID NO: 13910 - RNA, 22 nt, synthetic construct
  misc_feature 1..22: note = HBV-targeting guide sequence portion
  source 1..22: mol_type = other RNA
atactgcactcaggcaagcaat

SEQ ID NO: 13911 - RNA, 22 nt, synthetic construct
  misc_feature 1..22: note = HBV-targeting guide sequence portion
  source 1..22: mol_type = other RNA
atactgcggaactcctagccgc

SEQ ID NO: 13912 - RNA, 22 nt, synthetic construct
  misc_feature 1..22: note = HBV-targeting guide sequence portion
  source 1..22: mol_type = other RNA
atacttcaaagactgtttgttt

SEQ ID NO: 13913 - RNA, 22 nt, synthetic construct
  misc_feature 1..22: note = HBV-targeting guide sequence portion
  source 1..22: mol_type = other RNA
atacttgcccttggataagggt

SEQ ID NO: 13914 - RNA, 22 nt, synthetic construct
  misc_feature 1..22: note = HBV-targeting guide sequence portion
  source 1..22: mol_type = other RNA
atagaccaccaaatgcccctat

SEQ ID NO: 13915 - RNA, 22 nt, synthetic construct
  misc_feature 1..22: note = HBV-targeting guide sequence portion
  source 1..22: mol_type = other RNA
atagaggttccttgagcaggag

SEQ ID NO: 13916 - RNA, 22 nt, synthetic construct
  misc_feature 1..22: note = HBV-targeting guide sequence portion
  source 1..22: mol_type = other RNA
atagagtgtgtaaatagtgtct

SEQ ID NO: 13917 - RNA, 22 nt, synthetic construct
  misc_feature 1..22: note = HBV-targeting guide sequence portion
  source 1..22: mol_type = other RNA
atagcagcaggatgaagaggaa

SEQ ID NO: 13918 - RNA, 22 nt, synthetic construct
  misc_feature 1..22: note = HBV-targeting guide sequence portion
  source 1..22: mol_type = other RNA
atagcccatgaaattaagagaa

SEQ ID NO: 13919 - RNA, 22 nt, synthetic construct
  misc_feature 1..22: note = HBV-targeting guide sequence portion
  source 1..22: mol_type = other RNA
atagcgcctcattctgtgggtc

SEQ ID NO: 13920 - RNA, 22 nt, synthetic construct
  misc_feature 1..22: note = HBV-targeting guide sequence portion
  source 1..22: mol_type = other RNA
ataggaattttccgaaagccca

SEQ ID NO: 13921 - RNA, 22 nt, synthetic construct
  misc_feature 1..22: note = HBV-targeting guide sequence portion
  source 1..22: mol_type = other RNA
ataggataggggcatttggtgg

SEQ ID NO: 13922 - RNA, 22 nt, synthetic construct
  misc_feature 1..22: note = HBV-targeting guide sequence portion
  source 1..22: mol_type = other RNA
ataggccatcagcgcatgcgtg

SEQ ID NO: 13923 - RNA, 22 nt, synthetic construct
  misc_feature 1..22: note = HBV-targeting guide sequence portion
  source 1..22: mol_type = other RNA
ataggcctgttaaccgggagtt

SEQ ID NO: 13924 - RNA, 22 nt, synthetic construct
  misc_feature 1..22: note = HBV-targeting guide sequence portion
  source 1..22: mol_type = other RNA
ataggggcatttggtggtctat

SEQ ID NO: 13925 - RNA, 22 nt, synthetic construct
  misc_feature 1..22: note = HBV-targeting guide sequence portion
  source 1..22: mol_type = other RNA
atagtccagaagaaccaacaag

SEQ ID NO: 13926 - RNA, 22 nt, synthetic construct
  misc_feature 1..22: note = HBV-targeting guide sequence portion
  source 1..22: mol_type = other RNA
atagtgtctagtttggaagtaa

SEQ ID NO: 13927 - RNA, 22 nt, synthetic construct
  misc_feature 1..22: note = HBV-targeting guide sequence portion
  source 1..22: mol_type = other RNA
atagttgtctgaactttaggcc

SEQ ID NO: 13928 - RNA, 22 nt, synthetic construct
  misc_feature 1..22: note = HBV-targeting guide sequence portion
  source 1..22: mol_type = other RNA
atataaaacacccgccttccat

SEQ ID NO: 13929 - RNA, 22 nt, synthetic construct
  misc_feature 1..22: note = HBV-targeting guide sequence portion
  source 1..22: mol_type = other RNA
atataaagaatttggagctact

SEQ ID NO: 13930 - RNA, 22 nt, synthetic construct
  misc_feature 1..22: note = HBV-targeting guide sequence portion
  source 1..22: mol_type = other RNA
atataactgaaagccaaacagt

SEQ ID NO: 13931 - RNA, 22 nt, synthetic construct
  misc_feature 1..22: note = HBV-targeting guide sequence portion
  source 1..22: mol_type = other RNA
atataagagagtgtcaacacat

SEQ ID NO: 13932 - RNA, 22 nt, synthetic construct
  misc_feature 1..22: note = HBV-targeting guide sequence portion
  source 1..22: mol_type = other RNA
atatacatcgttcccatggctg

SEQ ID NO: 13933 - RNA, 22 nt, synthetic construct
  misc_feature 1..22: note = HBV-targeting guide sequence portion
  source 1..22: mol_type = other RNA
atatacatctacaccaagatat

SEQ ID NO: 13934 - RNA, 22 nt, synthetic construct
  misc_feature 1..22: note = HBV-targeting guide sequence portion
  source 1..22: mol_type = other RNA
atatcgtcaatcttctcgagga

SEQ ID NO: 13935 - RNA, 22 nt, synthetic construct
  misc_feature 1..22: note = HBV-targeting guide sequence portion
  source 1..22: mol_type = other RNA
atatcttggtgtagatgtatat

SEQ ID NO: 13936 - RNA, 22 nt, synthetic construct
  misc_feature 1..22: note = HBV-targeting guide sequence portion
  source 1..22: mol_type = other RNA
atatgagtgttgacataactga

SEQ ID NO: 13937 - RNA, 22 nt, synthetic construct
  misc_feature 1..22: note = HBV-targeting guide sequence portion
  source 1..22: mol_type = other RNA
atatggatgatgtggtattggg

SEQ ID NO: 13938 - RNA, 22 nt, synthetic construct
  misc_feature 1..22: note = HBV-targeting guide sequence portion
  source 1..22: mol_type = other RNA
atatgggcctaaagttcagaca

SEQ ID NO: 13939 - RNA, 22 nt, synthetic construct
  misc_feature 1..22: note = HBV-targeting guide sequence portion
  source 1..22: mol_type = other RNA
atatgggtcaatgtccatgccc

SEQ ID NO: 13940 - RNA, 22 nt, synthetic construct
  misc_feature 1..22: note = HBV-targeting guide sequence portion
  source 1..22: mol_type = other RNA
atatggtgacccacagaatgag

SEQ ID NO: 13941 - RNA, 22 nt, synthetic construct
  misc_feature 1..22: note = HBV-targeting guide sequence portion
  source 1..22: mol_type = other RNA
atatgtgagaggcagtagtcgg

SEQ ID NO: 13942 - RNA, 22 nt, synthetic construct
  misc_feature 1..22: note = HBV-targeting guide sequence portion
  source 1..22: mol_type = other RNA
atattaggaaaagagggtgttt

SEQ ID NO: 13943 - RNA, 22 nt, synthetic construct
  misc_feature 1..22: note = HBV-targeting guide sequence portion
  source 1..22: mol_type = other RNA
atattatcaaaaaatgtgaaca

SEQ ID NO: 13944 - RNA, 22 nt, synthetic construct
  misc_feature 1..22: note = HBV-targeting guide sequence portion
  source 1..22: mol_type = other RNA
atattcttgggaacaagagcta

SEQ ID NO: 13945 - RNA, 22 nt, synthetic construct
  misc_feature 1..22: note = HBV-targeting guide sequence portion
  source 1..22: mol_type = other RNA
atatttgcgggagaggacaaca

SEQ ID NO: 13946 - RNA, 22 nt, synthetic construct
  misc_feature 1..22: note = HBV-targeting guide sequence portion
  source 1..22: mol_type = other RNA
atcaaaaaatgtgaacagtttg

SEQ ID NO: 13947 - RNA, 22 nt, synthetic construct
  misc_feature 1..22: note = HBV-targeting guide sequence portion
  source 1..22: mol_type = other RNA
atcaaagaatgtttcagaaaac

SEQ ID NO: 13948 - RNA, 22 nt, synthetic construct
  misc_feature 1..22: note = HBV-targeting guide sequence portion
  source 1..22: mol_type = other RNA
atcaacacttccggagacttgt

SEQ ID NO: 13949 - RNA, 22 nt, synthetic construct
  misc_feature 1..22: note = HBV-targeting guide sequence portion
  source 1..22: mol_type = other RNA
atcaaccaccagcacgggaccc

SEQ ID NO: 13950 - RNA, 22 nt, synthetic construct
  misc_feature 1..22: note = HBV-targeting guide sequence portion
  source 1..22: mol_type = other RNA
atcaagcatctagggacctagt

SEQ ID NO: 13951 - RNA, 22 nt, synthetic construct
  misc_feature 1..22: note = HBV-targeting guide sequence portion
  source 1..22: mol_type = other RNA
atcaaggtatgtttcccgtctg

SEQ ID NO: 13952 - RNA, 22 nt, synthetic construct
  misc_feature 1..22: note = HBV-targeting guide sequence portion
  source 1..22: mol_type = other RNA
atcaataggcctgttaaccggg

SEQ ID NO: 13953 - RNA, 22 nt, synthetic construct
  misc_feature 1..22: note = HBV-targeting guide sequence portion
  source 1..22: mol_type = other RNA
atcaatgacatagcccatgaaa

SEQ ID NO: 13954 - RNA, 22 nt, synthetic construct
  misc_feature 1..22: note = HBV-targeting guide sequence portion
  source 1..22: mol_type = other RNA
atcaatttcaaccgtcttttct

SEQ ID NO: 13955 - RNA, 22 nt, synthetic construct
  misc_feature 1..22: note = HBV-targeting guide sequence portion
  source 1..22: mol_type = other RNA
atcacatcaggattcctaggac

SEQ ID NO: 13956 - RNA, 22 nt, synthetic construct
  misc_feature 1..22: note = HBV-targeting guide sequence portion
  source 1..22: mol_type = other RNA
atcacatcatacacaaaatcaa

SEQ ID NO: 13957 - RNA, 22 nt, synthetic construct
  misc_feature 1..22: note = HBV-targeting guide sequence portion
  source 1..22: mol_type = other RNA
atcactcaccaacctcctgtcc

SEQ ID NO: 13958 - RNA, 22 nt, synthetic construct
  misc_feature 1..22: note = HBV-targeting guide sequence portion
  source 1..22: mol_type = other RNA
atcagcaaacacttggcacaga

SEQ ID NO: 13959 - RNA, 22 nt, synthetic construct
  misc_feature 1..22: note = HBV-targeting guide sequence portion
  source 1..22: mol_type = other RNA
atcagcgcatgcgtggaacctt

SEQ ID NO: 13960 - RNA, 22 nt, synthetic construct
  misc_feature 1..22: note = HBV-targeting guide sequence portion
  source 1..22: mol_type = other RNA
atcaggattcctaggacccctg

SEQ ID NO: 13961 - RNA, 22 nt, synthetic construct
  misc_feature 1..22: note = HBV-targeting guide sequence portion
  source 1..22: mol_type = other RNA
atcatacacaaaatcaaagaat

SEQ ID NO: 13962 - RNA, 22 nt, synthetic construct
  misc_feature 1..22: note = HBV-targeting guide sequence portion
  source 1..22: mol_type = other RNA
atcatcaaccaccagcacggga

SEQ ID NO: 13963 - RNA, 22 nt, synthetic construct
  misc_feature 1..22: note = HBV-targeting guide sequence portion
  source 1..22: mol_type = other RNA
atcatccatataactgaaagcc

SEQ ID NO: 13964 - RNA, 22 nt, synthetic construct
  misc_feature 1..22: note = HBV-targeting guide sequence portion
  source 1..22: mol_type = other RNA
atcatcctgggctttcggaaaa

SEQ ID NO: 13965 - RNA, 22 nt, synthetic construct
  misc_feature 1..22: note = HBV-targeting guide sequence portion
  source 1..22: mol_type = other RNA
atcatctcttgttcatgtccta

SEQ ID NO: 13966 - RNA, 22 nt, synthetic construct
  misc_feature 1..22: note = HBV-targeting guide sequence portion
  source 1..22: mol_type = other RNA
atcatcttcctcttcatcctgc

SEQ ID NO: 13967 - RNA, 22 nt, synthetic construct
  misc_feature 1..22: note = HBV-targeting guide sequence portion
  source 1..22: mol_type = other RNA
atcattaatctaatctcctccc

SEQ ID NO: 13968 - RNA, 22 nt, synthetic construct
  misc_feature 1..22: note = HBV-targeting guide sequence portion
  source 1..22: mol_type = other RNA
atcattacttccaaactagaca

SEQ ID NO: 13969 - RNA, 22 nt, synthetic construct
  misc_feature 1..22: note = HBV-targeting guide sequence portion
  source 1..22: mol_type = other RNA
atcattgccacaaaatcacatc

SEQ ID NO: 13970 - RNA, 22 nt, synthetic construct
  misc_feature 1..22: note = HBV-targeting guide sequence portion
  source 1..22: mol_type = other RNA
atccaagggcaagtatttggtg

SEQ ID NO: 13971 - RNA, 22 nt, synthetic construct
  misc_feature 1..22: note = HBV-targeting guide sequence portion
  source 1..22: mol_type = other RNA
atccacactccaaaagacacca

SEQ ID NO: 13972 - RNA, 22 nt, synthetic construct
  misc_feature 1..22: note = HBV-targeting guide sequence portion
  source 1..22: mol_type = other RNA
atccagaacatctagttaatca

SEQ ID NO: 13973 - RNA, 22 nt, synthetic construct
  misc_feature 1..22: note = HBV-targeting guide sequence portion
  source 1..22: mol_type = other RNA
atccagattgggacttcaatcc

SEQ ID NO: 13974 - RNA, 22 nt, synthetic construct
  misc_feature 1..22: note = HBV-targeting guide sequence portion
  source 1..22: mol_type = other RNA
atccagcgataaccaggacaag

SEQ ID NO: 13975 - RNA, 22 nt, synthetic construct
  misc_feature 1..22: note = HBV-targeting guide sequence portion
  source 1..22: mol_type = other RNA
atccagttggcagcacagccta

SEQ ID NO: 13976 - RNA, 22 nt, synthetic construct
  misc_feature 1..22: note = HBV-targeting guide sequence portion
  source 1..22: mol_type = other RNA
atccatactgcggaactcctag

SEQ ID NO: 13977 - RNA, 22 nt, synthetic construct
  misc_feature 1..22: note = HBV-targeting guide sequence portion
  source 1..22: mol_type = other RNA
atccatataactgaaagccaaa

SEQ ID NO: 13978 - RNA, 22 nt, synthetic construct
  misc_feature 1..22: note = HBV-targeting guide sequence portion
  source 1..22: mol_type = other RNA
atcccaacaaggatccctggcc

SEQ ID NO: 13979 - RNA, 22 nt, synthetic construct
  misc_feature 1..22: note = HBV-targeting guide sequence portion
  source 1..22: mol_type = other RNA
atcccagaggattgctggtgga

SEQ ID NO: 13980 - RNA, 22 nt, synthetic construct
  misc_feature 1..22: note = HBV-targeting guide sequence portion
  source 1..22: mol_type = other RNA
atcccagagtgagaggcctgta

SEQ ID NO: 13981 - RNA, 22 nt, synthetic construct
  misc_feature 1..22: note = HBV-targeting guide sequence portion
  source 1..22: mol_type = other RNA
atcccatcatcctgggctttcg

SEQ ID NO: 13982 - RNA, 22 nt, synthetic construct
  misc_feature 1..22: note = HBV-targeting guide sequence portion
  source 1..22: mol_type = other RNA
atccccaacaatcaatgacata

SEQ ID NO: 13983 - RNA, 22 nt, synthetic construct
  misc_feature 1..22: note = HBV-targeting guide sequence portion
  source 1..22: mol_type = other RNA
atccccgagattgagatcttct

SEQ ID NO: 13984 - RNA, 22 nt, synthetic construct
  misc_feature 1..22: note = HBV-targeting guide sequence portion
  source 1..22: mol_type = other RNA
atcccgatacagagctgcggcg

SEQ ID NO: 13985 - RNA, 22 nt, synthetic construct
  misc_feature 1..22: note = HBV-targeting guide sequence portion
  source 1..22: mol_type = other RNA
atcccgcggacgacccatctcg

SEQ ID NO: 13986 - RNA, 22 nt, synthetic construct
  misc_feature 1..22: note = HBV-targeting guide sequence portion
  source 1..22: mol_type = other RNA
atccctcctgttgctgtacaaa

SEQ ID NO: 13987 - RNA, 22 nt, synthetic construct
  misc_feature 1..22: note = HBV-targeting guide sequence portion
  source 1..22: mol_type = other RNA
atccctggccagacgccaacaa

SEQ ID NO: 13988 - RNA, 22 nt, synthetic construct
  misc_feature 1..22: note = HBV-targeting guide sequence portion
  source 1..22: mol_type = other RNA
atcccttggactcataaggtgg

SEQ ID NO: 13989 - RNA, 22 nt, synthetic construct
  misc_feature 1..22: note = HBV-targeting guide sequence portion
  source 1..22: mol_type = other RNA
atccgaaggttttgtacagcaa

SEQ ID NO: 13990 - RNA, 22 nt, synthetic construct
  misc_feature 1..22: note = HBV-targeting guide sequence portion
  source 1..22: mol_type = other RNA
atccgcctcctgcctctaccaa

SEQ ID NO: 13991 - RNA, 22 nt, synthetic construct
  misc_feature 1..22: note = HBV-targeting guide sequence portion
  source 1..22: mol_type = other RNA
atcctaaattcaccaaatactt

SEQ ID NO: 13992 - RNA, 22 nt, synthetic construct
  misc_feature 1..22: note = HBV-targeting guide sequence portion
  source 1..22: mol_type = other RNA
atcctatcaacacttccggaga

SEQ ID NO: 13993 - RNA, 22 nt, synthetic construct
  misc_feature 1..22: note = HBV-targeting guide sequence portion
  source 1..22: mol_type = other RNA
atcctcacaataccgcagagtc

SEQ ID NO: 13994 - RNA, 22 nt, synthetic construct
  misc_feature 1..22: note = HBV-targeting guide sequence portion
  source 1..22: mol_type = other RNA
atcctcgagaagattgacgata

SEQ ID NO: 13995 - RNA, 22 nt, synthetic construct
  misc_feature 1..22: note = HBV-targeting guide sequence portion
  source 1..22: mol_type = other RNA
atcctctgggattctttcccga

SEQ ID NO: 13996 - RNA, 22 nt, synthetic construct
  misc_feature 1..22: note = HBV-targeting guide sequence portion
  source 1..22: mol_type = other RNA
atcctgatgtgatgttctccat

SEQ ID NO: 13997 - RNA, 22 nt, synthetic construct
  misc_feature 1..22: note = HBV-targeting guide sequence portion
  source 1..22: mol_type = other RNA
atcctgcgcgggacgtcctttg

SEQ ID NO: 13998 - RNA, 22 nt, synthetic construct
  misc_feature 1..22: note = HBV-targeting guide sequence portion
  source 1..22: mol_type = other RNA
atcctgctgctatgcctcatct

SEQ ID NO: 13999 - RNA, 22 nt, synthetic construct
  misc_feature 1..22: note = HBV-targeting guide sequence portion
  source 1..22: mol_type = other RNA
atcctgctttaatgcccttgta

SEQ ID NO: 14000 - RNA, 22 nt, synthetic construct
  misc_feature 1..22: note = HBV-targeting guide sequence portion
  source 1..22: mol_type = other RNA
atcctggaattagaggacagac

SEQ ID NO: 14001 - RNA, 22 nt, synthetic construct
  misc_feature 1..22: note = HBV-targeting guide sequence portion
  source 1..22: mol_type = other RNA
atcctgggctttcggaaaattc

SEQ ID NO: 14002 - RNA, 22 nt, synthetic construct
  misc_feature 1..22: note = HBV-targeting guide sequence portion
  source 1..22: mol_type = other RNA
atccttgttgggattgaagtcc

SEQ ID NO: 14003 - RNA, 22 nt, synthetic construct
  misc_feature 1..22: note = HBV-targeting guide sequence portion
  source 1..22: mol_type = other RNA
atcgccagtcaggacggcagcc

SEQ ID NO: 14004 - RNA, 22 nt, synthetic construct
  misc_feature 1..22: note = HBV-targeting guide sequence portion
  source 1..22: mol_type = other RNA
atcgccgcgtcgcagaagatct

SEQ ID NO: 14005 - RNA, 22 nt, synthetic construct
  misc_feature 1..22: note = HBV-targeting guide sequence portion
  source 1..22: mol_type = other RNA
atcgctggatgtgtctgcggcg

SEQ ID NO: 14006 - RNA, 22 nt, synthetic construct
  misc_feature 1..22: note = HBV-targeting guide sequence portion
  source 1..22: mol_type = other RNA
atcggcagaggagccggaaagg

SEQ ID NO: 14007 - RNA, 22 nt, synthetic construct
  misc_feature 1..22: note = HBV-targeting guide sequence portion
  source 1..22: mol_type = other RNA
atcgggatgccttggagtctcc

SEQ ID NO: 14008 - RNA, 22 nt, synthetic construct
  misc_feature 1..22: note = HBV-targeting guide sequence portion
  source 1..22: mol_type = other RNA
atcgtcaatcttctcgaggatt

SEQ ID NO: 14009 - RNA, 22 nt, synthetic construct
  misc_feature 1..22: note = HBV-targeting guide sequence portion
  source 1..22: mol_type = other RNA
atcgttcccatggctgctaggc

SEQ ID NO: 14010 - RNA, 22 nt, synthetic construct
  misc_feature 1..22: note = HBV-targeting guide sequence portion
  source 1..22: mol_type = other RNA
atctaagcaggctttcactttt

SEQ ID NO: 14011 - RNA, 22 nt, synthetic construct
  misc_feature 1..22: note = HBV-targeting guide sequence portion
  source 1..22: mol_type = other RNA
atctaatctcctcccccaactc

SEQ ID NO: 14012 - RNA, 22 nt, synthetic construct
  misc_feature 1..22: note = HBV-targeting guide sequence portion
  source 1..22: mol_type = other RNA
atctacaccaagatattatcaa

SEQ ID NO: 14013 - RNA, 22 nt, synthetic construct
  misc_feature 1..22: note = HBV-targeting guide sequence portion
  source 1..22: mol_type = other RNA
atctagaagatctcgtacggaa

SEQ ID NO: 14014 - RNA, 22 nt, synthetic construct
  misc_feature 1..22: note = HBV-targeting guide sequence portion
  source 1..22: mol_type = other RNA
atctagggacctagtagtcagt

SEQ ID NO: 14015 - RNA, 22 nt, synthetic construct
  misc_feature 1..22: note = HBV-targeting guide sequence portion
  source 1..22: mol_type = other RNA
atctagttaatcattacttcca

SEQ ID NO: 14016 - RNA, 22 nt, synthetic construct
  misc_feature 1..22: note = HBV-targeting guide sequence portion
  source 1..22: mol_type = other RNA
atctcaatcgccgcgtcgcaga

SEQ ID NO: 14017 - RNA, 22 nt, synthetic construct
  misc_feature 1..22: note = HBV-targeting guide sequence portion
  source 1..22: mol_type = other RNA
atctcaatctcggggatctcaa

SEQ ID NO: 14018 - RNA, 22 nt, synthetic construct
  misc_feature 1..22: note = HBV-targeting guide sequence portion
  source 1..22: mol_type = other RNA
atctcaatgttagtatcccttg

SEQ ID NO: 14019 - RNA, 22 nt, synthetic construct
  misc_feature 1..22: note = HBV-targeting guide sequence portion
  source 1..22: mol_type = other RNA
atctccctgctggtggctccag

SEQ ID NO: 14020 - RNA, 22 nt, synthetic construct
  misc_feature 1..22: note = HBV-targeting guide sequence portion
  source 1..22: mol_type = other RNA
atctcctcccccaactcctccc

SEQ ID NO: 14021 - RNA, 22 nt, synthetic construct
  misc_feature 1..22: note = HBV-targeting guide sequence portion
  source 1..22: mol_type = other RNA
atctcgaggccgcttggggccc

SEQ ID NO: 14022 - RNA, 22 nt, synthetic construct
  misc_feature 1..22: note = HBV-targeting guide sequence portion
  source 1..22: mol_type = other RNA
atctcggggatctcaatgttag

SEQ ID NO: 14023 - RNA, 22 nt, synthetic construct
  misc_feature 1..22: note = HBV-targeting guide sequence portion
  source 1..22: mol_type = other RNA
atctcgtacggaaggaaagaag

SEQ ID NO: 14024 - RNA, 22 nt, synthetic construct
  misc_feature 1..22: note = HBV-targeting guide sequence portion
  source 1..22: mol_type = other RNA
atctcttgttcatgtcctactg

SEQ ID NO: 14025 - RNA, 22 nt, synthetic construct
  misc_feature 1..22: note = HBV-targeting guide sequence portion
  source 1..22: mol_type = other RNA
atctctttgttttgttagggtt

SEQ ID NO: 14026 - RNA, 22 nt, synthetic construct
  misc_feature 1..22: note = HBV-targeting guide sequence portion
  source 1..22: mol_type = other RNA
atctgccggaccgtgtgcactt

SEQ ID NO: 14027 - RNA, 22 nt, synthetic construct
  misc_feature 1..22: note = HBV-targeting guide sequence portion
  source 1..22: mol_type = other RNA
atctggattgttggagtttgct

SEQ ID NO: 14028 - RNA, 22 nt, synthetic construct
  misc_feature 1..22: note = HBV-targeting guide sequence portion
  source 1..22: mol_type = other RNA
atcttcctcttcatcctgctgc

SEQ ID NO: 14029 - RNA, 22 nt, synthetic construct
  misc_feature 1..22: note = HBV-targeting guide sequence portion
  source 1..22: mol_type = other RNA
atcttcgtctgcgaggcgaggg

SEQ ID NO: 14030 - RNA, 22 nt, synthetic construct
  misc_feature 1..22: note = HBV-targeting guide sequence portion
  source 1..22: mol_type = other RNA
atcttctaaattagtacccacc

SEQ ID NO: 14031 - RNA, 22 nt, synthetic construct
  misc_feature 1..22: note = HBV-targeting guide sequence portion
  source 1..22: mol_type = other RNA
atcttctagataccgccgcagc

SEQ ID NO: 14032 - RNA, 22 nt, synthetic construct
  misc_feature 1..22: note = HBV-targeting guide sequence portion
  source 1..22: mol_type = other RNA
atcttctcgaggattggggacc

SEQ ID NO: 14033 - RNA, 22 nt, synthetic construct
  misc_feature 1..22: note = HBV-targeting guide sequence portion
  source 1..22: mol_type = other RNA
atcttctgcgacgcggcgattg

SEQ ID NO: 14034 - RNA, 22 nt, synthetic construct
  misc_feature 1..22: note = HBV-targeting guide sequence portion
  source 1..22: mol_type = other RNA
atcttcttgttggttcttctgg

SEQ ID NO: 14035 - RNA, 22 nt, synthetic construct
  misc_feature 1..22: note = HBV-targeting guide sequence portion
  source 1..22: mol_type = other RNA
atcttgagtccctttataccgc

SEQ ID NO: 14036 - RNA, 22 nt, synthetic construct
  misc_feature 1..22: note = HBV-targeting guide sequence portion
  source 1..22: mol_type = other RNA
atcttgcagagtttggtggaag

SEQ ID NO: 14037 - RNA, 22 nt, synthetic construct
  misc_feature 1..22: note = HBV-targeting guide sequence portion
  source 1..22: mol_type = other RNA
atcttggtgtagatgtatatta

SEQ ID NO: 14038 - RNA, 22 nt, synthetic construct
  misc_feature 1..22: note = HBV-targeting guide sequence portion
  source 1..22: mol_type = other RNA
atctttccaccagcaatcctct

SEQ ID NO: 14039 - RNA, 22 nt, synthetic construct
  misc_feature 1..22: note = HBV-targeting guide sequence portion
  source 1..22: mol_type = other RNA
atctttgtactaggaggctgta

SEQ ID NO: 14040 - RNA, 22 nt, synthetic construct
  misc_feature 1..22: note = HBV-targeting guide sequence portion
  source 1..22: mol_type = other RNA
atgaaattaagagaataacccc

SEQ ID NO: 14041 - RNA, 22 nt, synthetic construct
  misc_feature 1..22: note = HBV-targeting guide sequence portion
  source 1..22: mol_type = other RNA
atgaacaagagatgattaggca

SEQ ID NO: 14042 - RNA, 22 nt, synthetic construct
  misc_feature 1..22: note = HBV-targeting guide sequence portion
  source 1..22: mol_type = other RNA
atgaagaggaagatgataaaac

SEQ ID NO: 14043 - RNA, 22 nt, synthetic construct
  misc_feature 1..22: note = HBV-targeting guide sequence portion
  source 1..22: mol_type = other RNA
atgacatagcccatgaaattaa

SEQ ID NO: 14044 - RNA, 22 nt, synthetic construct
  misc_feature 1..22: note = HBV-targeting guide sequence portion
  source 1..22: mol_type = other RNA
atgaccaagccccaaccagtgg

SEQ ID NO: 14045 - RNA, 22 nt, synthetic construct
  misc_feature 1..22: note = HBV-targeting guide sequence portion
  source 1..22: mol_type = other RNA
atgactctagctacctgggtgg

SEQ ID NO: 14046 - RNA, 22 nt, synthetic construct
  misc_feature 1..22: note = HBV-targeting guide sequence portion
  source 1..22: mol_type = other RNA
atgagaaaagacggttgaaatt

SEQ ID NO: 14047 - RNA, 22 nt, synthetic construct
  misc_feature 1..22: note = HBV-targeting guide sequence portion
  source 1..22: mol_type = other RNA
atgagaaggcacagacggggag

SEQ ID NO: 14048 - RNA, 22 nt, synthetic construct
  misc_feature 1..22: note = HBV-targeting guide sequence portion
  source 1..22: mol_type = other RNA
atgaggcatagcagcaggatga

SEQ ID NO: 14049 - RNA, 22 nt, synthetic construct
  misc_feature 1..22: note = HBV-targeting guide sequence portion
  source 1..22: mol_type = other RNA
atgaggcgctatgtgttgacac

SEQ ID NO: 14050 - RNA, 22 nt, synthetic construct
  misc_feature 1..22: note = HBV-targeting guide sequence portion
  source 1..22: mol_type = other RNA
atgagggttaaagacaggtaca

SEQ ID NO: 14051 - RNA, 22 nt, synthetic construct
  misc_feature 1..22: note = HBV-targeting guide sequence portion
  source 1..22: mol_type = other RNA
atgagtccaagggatactaaca

SEQ ID NO: 14052 - RNA, 22 nt, synthetic construct
  misc_feature 1..22: note = HBV-targeting guide sequence portion
  source 1..22: mol_type = other RNA
atgagtgttgacataactgact

SEQ ID NO: 14053 - RNA, 22 nt, synthetic construct
  misc_feature 1..22: note = HBV-targeting guide sequence portion
  source 1..22: mol_type = other RNA
atgagtgtttctcagaggtgga

SEQ ID NO: 14054 - RNA, 22 nt, synthetic construct
  misc_feature 1..22: note = HBV-targeting guide sequence portion
  source 1..22: mol_type = other RNA
atgataaaacgccgcagacaca

SEQ ID NO: 14055 - RNA, 22 nt, synthetic construct
  misc_feature 1..22: note = HBV-targeting guide sequence portion
  source 1..22: mol_type = other RNA
atgatccccaacaatcaatgac

SEQ ID NO: 14056 - RNA, 22 nt, synthetic construct
  misc_feature 1..22: note = HBV-targeting guide sequence portion
  source 1..22: mol_type = other RNA
atgatcctggaattagaggaca

SEQ ID NO: 14057 - RNA, 22 nt, synthetic construct
  misc_feature 1..22: note = HBV-targeting guide sequence portion
  source 1..22: mol_type = other RNA
atgatctttgtactaggaggct

SEQ ID NO: 14058 - RNA, 22 nt, synthetic construct
  misc_feature 1..22: note = HBV-targeting guide sequence portion
  source 1..22: mol_type = other RNA
atgatgggatgggaatacaggt

SEQ ID NO: 14059 - RNA, 22 nt, synthetic construct
  misc_feature 1..22: note = HBV-targeting guide sequence portion
  source 1..22: mol_type = other RNA
atgatgtgattttgtggcaatg

SEQ ID NO: 14060 - RNA, 22 nt, synthetic construct
  misc_feature 1..22: note = HBV-targeting guide sequence portion
  source 1..22: mol_type = other RNA
atgatgtggtattgggggccaa

SEQ ID NO: 14061 - RNA, 22 nt, synthetic construct
  misc_feature 1..22: note = HBV-targeting guide sequence portion
  source 1..22: mol_type = other RNA
atgattaactagatgttctgga

SEQ ID NO: 14062 - RNA, 22 nt, synthetic construct
  misc_feature 1..22: note = HBV-targeting guide sequence portion
  source 1..22: mol_type = other RNA
atgattaggcagaggtgaaaaa

SEQ ID NO: 14063 - RNA, 22 nt, synthetic construct
  misc_feature 1..22: note = HBV-targeting guide sequence portion
  source 1..22: mol_type = other RNA
atgcaaaccttgccagcaaatc

SEQ ID NO: 14064 - RNA, 22 nt, synthetic construct
  misc_feature 1..22: note = HBV-targeting guide sequence portion
  source 1..22: mol_type = other RNA
atgcaacccccactggttgggg

SEQ ID NO: 14065 - RNA, 22 nt, synthetic construct
  misc_feature 1..22: note = HBV-targeting guide sequence portion
  source 1..22: mol_type = other RNA
atgcaactttttcacctctgcc

SEQ ID NO: 14066 - RNA, 22 nt, synthetic construct
  misc_feature 1..22: note = HBV-targeting guide sequence portion
  source 1..22: mol_type = other RNA
atgcatacaagggcattaaagc

SEQ ID NO: 14067 - RNA, 22 nt, synthetic construct
  misc_feature 1..22: note = HBV-targeting guide sequence portion
  source 1..22: mol_type = other RNA
atgcatgtattcaatctaagca

SEQ ID NO: 14068 - RNA, 22 nt, synthetic construct
  misc_feature 1..22: note = HBV-targeting guide sequence portion
  source 1..22: mol_type = other RNA
atgcccctatcctatcaacact

SEQ ID NO: 14069 - RNA, 22 nt, synthetic construct
  misc_feature 1..22: note = HBV-targeting guide sequence portion
  source 1..22: mol_type = other RNA
atgccctaaagccacccaaggc

SEQ ID NO: 14070 - RNA, 22 nt, synthetic construct
  misc_feature 1..22: note = HBV-targeting guide sequence portion
  source 1..22: mol_type = other RNA
atgccctgagcctgagggctcc

SEQ ID NO: 14071 - RNA, 22 nt, synthetic construct
  misc_feature 1..22: note = HBV-targeting guide sequence portion
  source 1..22: mol_type = other RNA
atgcccttgtatgcatgtattc

SEQ ID NO: 14072 - RNA, 22 nt, synthetic construct
  misc_feature 1..22: note = HBV-targeting guide sequence portion
  source 1..22: mol_type = other RNA
atgcctacagcctcctagtaca

SEQ ID NO: 14073 - RNA, 22 nt, synthetic construct
  misc_feature 1..22: note = HBV-targeting guide sequence portion
  source 1..22: mol_type = other RNA
atgcctcaaggtcggtcgttga

SEQ ID NO: 14074 - RNA, 22 nt, synthetic construct
  misc_feature 1..22: note = HBV-targeting guide sequence portion
  source 1..22: mol_type = other RNA
atgcctcatcttcttgttggtt

SEQ ID NO: 14075 - RNA, 22 nt, synthetic construct
  misc_feature 1..22: note = HBV-targeting guide sequence portion
  source 1..22: mol_type = other RNA
atgcctgctaggttttatccta

SEQ ID NO: 14076 - RNA, 22 nt, synthetic construct
  misc_feature 1..22: note = HBV-targeting guide sequence portion
  source 1..22: mol_type = other RNA
atgccttggagtctcctgagca

SEQ ID NO: 14077 - RNA, 22 nt, synthetic construct
  misc_feature 1..22: note = HBV-targeting guide sequence portion
  source 1..22: mol_type = other RNA
atgcgacgtgcagaggtgaagc

SEQ ID NO: 14078 - RNA, 22 nt, synthetic construct
  misc_feature 1..22: note = HBV-targeting guide sequence portion
  source 1..22: mol_type = other RNA
atgcgctgatggcctatgacca

SEQ ID NO: 14079 - RNA, 22 nt, synthetic construct
  misc_feature 1..22: note = HBV-targeting guide sequence portion
  source 1..22: mol_type = other RNA
atgcgtggaacctttccggctc

SEQ ID NO: 14080 - RNA, 22 nt, synthetic construct
  misc_feature 1..22: note = HBV-targeting guide sequence portion
  source 1..22: mol_type = other RNA
atgctcaggagactccaaggca

SEQ ID NO: 14081 - RNA, 22 nt, synthetic construct
  misc_feature 1..22: note = HBV-targeting guide sequence portion
  source 1..22: mol_type = other RNA
atgctccagctcctaccttgtt

SEQ ID NO: 14082 - RNA, 22 nt, synthetic construct
  misc_feature 1..22: note = HBV-targeting guide sequence portion
  source 1..22: mol_type = other RNA
atgctgtacagacttggccccc

SEQ ID NO: 14083 - RNA, 22 nt, synthetic construct
  misc_feature 1..22: note = HBV-targeting guide sequence portion
  source 1..22: mol_type = other RNA
atgctgtagctcttgttcccaa

SEQ ID NO: 14084 - RNA, 22 nt, synthetic construct
  misc_feature 1..22: note = HBV-targeting guide sequence portion
  source 1..22: mol_type = other RNA
atgcttgatcttctaaattagt

SEQ ID NO: 14085 - RNA, 22 nt, synthetic construct
  misc_feature 1..22: note = HBV-targeting guide sequence portion
  source 1..22: mol_type = other RNA
atggaaactgcacctgtattcc

SEQ ID NO: 14086 - RNA, 22 nt, synthetic construct
  misc_feature 1..22: note = HBV-targeting guide sequence portion
  source 1..22: mol_type = other RNA
atggaaggcgggtgttttatat

SEQ ID NO: 14087 - RNA, 22 nt, synthetic construct
  misc_feature 1..22: note = HBV-targeting guide sequence portion
  source 1..22: mol_type = other RNA
atggacattgacccatataaag

SEQ ID NO: 14088 - RNA, 22 nt, synthetic construct
  misc_feature 1..22: note = HBV-targeting guide sequence portion
  source 1..22: mol_type = other RNA
atggagaacatcacatcaggat

SEQ ID NO: 14089 - RNA, 22 nt, synthetic construct
  misc_feature 1..22: note = HBV-targeting guide sequence portion
  source 1..22: mol_type = other RNA
atggagaccaccgtgaacgccc

SEQ ID NO: 14090 - RNA, 22 nt, synthetic construct
  misc_feature 1..22: note = HBV-targeting guide sequence portion
  source 1..22: mol_type = other RNA
atggatcggcagaggagccgga

SEQ ID NO: 14091 - RNA, 22 nt, synthetic construct
  misc_feature 1..22: note = HBV-targeting guide sequence portion
  source 1..22: mol_type = other RNA
atggatgatgtggtattggggg

SEQ ID NO: 14092 - RNA, 22 nt, synthetic construct
  misc_feature 1..22: note = HBV-targeting guide sequence portion
  source 1..22: mol_type = other RNA
atggcactagtaaactgagcca

SEQ ID NO: 14093 - RNA, 22 nt, synthetic construct
  misc_feature 1..22: note = HBV-targeting guide sequence portion
  source 1..22: mol_type = other RNA
atggcctatgaccaagccccaa

SEQ ID NO: 14094 - RNA, 22 nt, synthetic construct
  misc_feature 1..22: note = HBV-targeting guide sequence portion
  source 1..22: mol_type = other RNA
atggcctgaggatgagtgtttc

SEQ ID NO: 14095 - RNA, 22 nt, synthetic construct
  misc_feature 1..22: note = HBV-targeting guide sequence portion
  source 1..22: mol_type = other RNA
atggctgctaggctgtgctgcc

SEQ ID NO: 14096 - RNA, 22 nt, synthetic construct
  misc_feature 1..22: note = HBV-targeting guide sequence portion
  source 1..22: mol_type = other RNA
atgggaacgatgtatatttgcg

SEQ ID NO: 14097 - RNA, 22 nt, synthetic construct
  misc_feature 1..22: note = HBV-targeting guide sequence portion
  source 1..22: mol_type = other RNA
atgggaatacaggtgcagtttc

SEQ ID NO: 14098 - RNA, 22 nt, synthetic construct
  misc_feature 1..22: note = HBV-targeting guide sequence portion
  source 1..22: mol_type = other RNA
atgggagtgggcctcagcccgt

SEQ ID NO: 14099 - RNA, 22 nt, synthetic construct
  misc_feature 1..22: note = HBV-targeting guide sequence portion
  source 1..22: mol_type = other RNA
atgggatgggaatacaggtgca

SEQ ID NO: 14100 - RNA, 22 nt, synthetic construct
  misc_feature 1..22: note = HBV-targeting guide sequence portion
  source 1..22: mol_type = other RNA
atgggcctaaagttcagacaac

SEQ ID NO: 14101 - RNA, 22 nt, synthetic construct
  misc_feature 1..22: note = HBV-targeting guide sequence portion
  source 1..22: mol_type = other RNA
atgggctatgtcattgattgtt

SEQ ID NO: 14102 - RNA, 22 nt, synthetic construct
  misc_feature 1..22: note = HBV-targeting guide sequence portion
  source 1..22: mol_type = other RNA
atggggcagaatctttccacca

SEQ ID NO: 14103 - RNA, 22 nt, synthetic construct
  misc_feature 1..22: note = HBV-targeting guide sequence portion
  source 1..22: mol_type = other RNA
atggggttattctcttaatttc

SEQ ID NO: 14104 - RNA, 22 nt, synthetic construct
  misc_feature 1..22: note = HBV-targeting guide sequence portion
  source 1..22: mol_type = other RNA
atgggtcaatgtccatgcccta

SEQ ID NO: 14105 - RNA, 22 nt, synthetic construct
  misc_feature 1..22: note = HBV-targeting guide sequence portion
  source 1..22: mol_type = other RNA
atgggtcgtccgcgggattcag

SEQ ID NO: 14106 - RNA, 22 nt, synthetic construct
  misc_feature 1..22: note = HBV-targeting guide sequence portion
  source 1..22: mol_type = other RNA
atggtgacccacagaatgaggc

SEQ ID NO: 14107 - RNA, 22 nt, synthetic construct
  misc_feature 1..22: note = HBV-targeting guide sequence portion
  source 1..22: mol_type = other RNA
atggtgaggtgaacaatgctca

SEQ ID NO: 14108 - RNA, 22 nt, synthetic construct
  misc_feature 1..22: note = HBV-targeting guide sequence portion
  source 1..22: mol_type = other RNA
atggtgctggtgcgcagaccaa

SEQ ID NO: 14109 - RNA, 22 nt, synthetic construct
  misc_feature 1..22: note = HBV-targeting guide sequence portion
  source 1..22: mol_type = other RNA
atgtaagaccttgggcaagaat

SEQ ID NO: 14110 - RNA, 22 nt, synthetic construct
  misc_feature 1..22: note = HBV-targeting guide sequence portion
  source 1..22: mol_type = other RNA
atgtacacccaaagacaaaaga

SEQ ID NO: 14111 - RNA, 22 nt, synthetic construct
  misc_feature 1..22: note = HBV-targeting guide sequence portion
  source 1..22: mol_type = other RNA
atgtatattaggaaaagagggt

SEQ ID NO: 14112 - RNA, 22 nt, synthetic construct
  misc_feature 1..22: note = HBV-targeting guide sequence portion
  source 1..22: mol_type = other RNA
atgtatatttgcgggagaggac

SEQ ID NO: 14113 - RNA, 22 nt, synthetic construct
  misc_feature 1..22: note = HBV-targeting guide sequence portion
  source 1..22: mol_type = other RNA
atgtatccctcctgttgctgta

SEQ ID NO: 14114 - RNA, 22 nt, synthetic construct
  misc_feature 1..22: note = HBV-targeting guide sequence portion
  source 1..22: mol_type = other RNA
atgtattcaatctaagcaggct

SEQ ID NO: 14115 - RNA, 22 nt, synthetic construct
  misc_feature 1..22: note = HBV-targeting guide sequence portion
  source 1..22: mol_type = other RNA
atgtcaacactcatatgggcct

SEQ ID NO: 14116 - RNA, 22 nt, synthetic construct
  misc_feature 1..22: note = HBV-targeting guide sequence portion
  source 1..22: mol_type = other RNA
atgtcaacgaccgaccttgagg

SEQ ID NO: 14117 - RNA, 22 nt, synthetic construct
  misc_feature 1..22: note = HBV-targeting guide sequence portion
  source 1..22: mol_type = other RNA
atgtcattgattgttggggatc

SEQ ID NO: 14118 - RNA, 22 nt, synthetic construct
  misc_feature 1..22: note = HBV-targeting guide sequence portion
  source 1..22: mol_type = other RNA
atgtccatgccctaaagccacc

SEQ ID NO: 14119 - RNA, 22 nt, synthetic construct
  misc_feature 1..22: note = HBV-targeting guide sequence portion
  source 1..22: mol_type = other RNA
atgtcctactgttcaagcctcc

SEQ ID NO: 14120 - RNA, 22 nt, synthetic construct
  misc_feature 1..22: note = HBV-targeting guide sequence portion
  source 1..22: mol_type = other RNA
atgtgaaaccacaatagttgtc

SEQ ID NO: 14121 - RNA, 22 nt, synthetic construct
  misc_feature 1..22: note = HBV-targeting guide sequence portion
  source 1..22: mol_type = other RNA
atgtgaacagtttgtaggcccg

SEQ ID NO: 14122 - RNA, 22 nt, synthetic construct
  misc_feature 1..22: note = HBV-targeting guide sequence portion
  source 1..22: mol_type = other RNA
atgtgagaggcagtagtcggaa

SEQ ID NO: 14123 - RNA, 22 nt, synthetic construct
  misc_feature 1..22: note = HBV-targeting guide sequence portion
  source 1..22: mol_type = other RNA
atgtgatgttctccatgttcag

SEQ ID NO: 14124 - RNA, 22 nt, synthetic construct
  misc_feature 1..22: note = HBV-targeting guide sequence portion
  source 1..22: mol_type = other RNA
atgtgattttgtggcaatgatc

SEQ ID NO: 14125 - RNA, 22 nt, synthetic construct
  misc_feature 1..22: note = HBV-targeting guide sequence portion
  source 1..22: mol_type = other RNA
atgtggtattgggggccaagtc

SEQ ID NO: 14126 - RNA, 22 nt, synthetic construct
  misc_feature 1..22: note = HBV-targeting guide sequence portion
  source 1..22: mol_type = other RNA
atgtggttatcctgctttaatg

SEQ ID NO: 14127 - RNA, 22 nt, synthetic construct
  misc_feature 1..22: note = HBV-targeting guide sequence portion
  source 1..22: mol_type = other RNA
atgtgtctgcggcgttttatca

SEQ ID NO: 14128 - RNA, 22 nt, synthetic construct
  misc_feature 1..22: note = HBV-targeting guide sequence portion
  source 1..22: mol_type = other RNA
atgtgttgacactctcttatat

SEQ ID NO: 14129 - RNA, 22 nt, synthetic construct
  misc_feature 1..22: note = HBV-targeting guide sequence portion
  source 1..22: mol_type = other RNA
atgttagtatcccttggactca

SEQ ID NO: 14130 - RNA, 22 nt, synthetic construct
  misc_feature 1..22: note = HBV-targeting guide sequence portion
  source 1..22: mol_type = other RNA
atgttcagcgcagggtccccaa

SEQ ID NO: 14131 - RNA, 22 nt, synthetic construct
  misc_feature 1..22: note = HBV-targeting guide sequence portion
  source 1..22: mol_type = other RNA
atgttctccatgttcagcgcag

SEQ ID NO: 14132 - RNA, 22 nt, synthetic construct
  misc_feature 1..22: note = HBV-targeting guide sequence portion
  source 1..22: mol_type = other RNA
atgttctggataataaggttta

SEQ ID NO: 14133 - RNA, 22 nt, synthetic construct
  misc_feature 1..22: note = HBV-targeting guide sequence portion
  source 1..22: mol_type = other RNA
atgtttcagaaaactcccggtt

SEQ ID NO: 14134 - RNA, 22 nt, synthetic construct
  misc_feature 1..22: note = HBV-targeting guide sequence portion
  source 1..22: mol_type = other RNA
atgtttcccgtctgtcctctaa

SEQ ID NO: 14135 - RNA, 22 nt, synthetic construct
  misc_feature 1..22: note = HBV-targeting guide sequence portion
  source 1..22: mol_type = other RNA
atgtttgctccagaccggctgc

SEQ ID NO: 14136 - RNA, 22 nt, synthetic construct
  misc_feature 1..22: note = HBV-targeting guide sequence portion
  source 1..22: mol_type = other RNA
attaaaccttattatccagaac

SEQ ID NO: 14137 - RNA, 22 nt, synthetic construct
  misc_feature 1..22: note = HBV-targeting guide sequence portion
  source 1..22: mol_type = other RNA
attaaagcaggataaccacatt

SEQ ID NO: 14138 - RNA, 22 nt, synthetic construct
  misc_feature 1..22: note = HBV-targeting guide sequence portion
  source 1..22: mol_type = other RNA
attaactagatgttctggataa

SEQ ID NO: 14139 - RNA, 22 nt, synthetic construct
  misc_feature 1..22: note = HBV-targeting guide sequence portion
  source 1..22: mol_type = other RNA
attaactgtaagcgggcctaca

SEQ ID NO: 14140 - RNA, 22 nt, synthetic construct
  misc_feature 1..22: note = HBV-targeting guide sequence portion
  source 1..22: mol_type = other RNA
attaagagaataaccccatctc

SEQ ID NO: 14141 - RNA, 22 nt, synthetic construct
  misc_feature 1..22: note = HBV-targeting guide sequence portion
  source 1..22: mol_type = other RNA
attaatctaatctcctccccca

SEQ ID NO: 14142 - RNA, 22 nt, synthetic construct
  misc_feature 1..22: note = HBV-targeting guide sequence portion
  source 1..22: mol_type = other RNA
attaatgatctttgtactagga

SEQ ID NO: 14143 - RNA, 22 nt, synthetic construct
  misc_feature 1..22: note = HBV-targeting guide sequence portion
  source 1..22: mol_type = other RNA
attacttccaaactagacacta

SEQ ID NO: 14144 - RNA, 22 nt, synthetic construct
  misc_feature 1..22: note = HBV-targeting guide sequence portion
  source 1..22: mol_type = other RNA
attagaggacagacgggaaaca

SEQ ID NO: 14145 - RNA, 22 nt, synthetic construct
  misc_feature 1..22: note = HBV-targeting guide sequence portion
  source 1..22: mol_type = other RNA
attagattaatgatctttgtac

SEQ ID NO: 14146 - RNA, 22 nt, synthetic construct
  misc_feature 1..22: note = HBV-targeting guide sequence portion
  source 1..22: mol_type = other RNA
attaggaaaagagggtgttttc

SEQ ID NO: 14147 - RNA, 22 nt, synthetic construct
  misc_feature 1..22: note = HBV-targeting guide sequence portion
  source 1..22: mol_type = other RNA
attaggcagaggtgaaaaagtt

SEQ ID NO: 14148 - RNA, 22 nt, synthetic construct
  misc_feature 1..22: note = HBV-targeting guide sequence portion
  source 1..22: mol_type = other RNA
attagtacccacccaggtagct

SEQ ID NO: 14149 - RNA, 22 nt, synthetic construct
  misc_feature 1..22: note = HBV-targeting guide sequence portion
  source 1..22: mol_type = other RNA
attagttctccccagcaaagaa

SEQ ID NO: 14150 - RNA, 22 nt, synthetic construct
  misc_feature 1..22: note = HBV-targeting guide sequence portion
  source 1..22: mol_type = other RNA
attatcaaaaaatgtgaacagt

SEQ ID NO: 14151 - RNA, 22 nt, synthetic construct
  misc_feature 1..22: note = HBV-targeting guide sequence portion
  source 1..22: mol_type = other RNA
attatccagaacatctagttaa

SEQ ID NO: 14152 - RNA, 22 nt, synthetic construct
  misc_feature 1..22: note = HBV-targeting guide sequence portion
  source 1..22: mol_type = other RNA
attatgccctgagcctgagggc

SEQ ID NO: 14153 - RNA, 22 nt, synthetic construct
  misc_feature 1..22: note = HBV-targeting guide sequence portion
  source 1..22: mol_type = other RNA
attatgcctgctaggttttatc

SEQ ID NO: 14154 - RNA, 22 nt, synthetic construct
  misc_feature 1..22: note = HBV-targeting guide sequence portion
  source 1..22: mol_type = other RNA
attcaatctaagcaggctttca

SEQ ID NO: 14155 - RNA, 22 nt, synthetic construct
  misc_feature 1..22: note = HBV-targeting guide sequence portion
  source 1..22: mol_type = other RNA
attcaccaaatacttgcccttg

SEQ ID NO: 14156 - RNA, 22 nt, synthetic construct
  misc_feature 1..22: note = HBV-targeting guide sequence portion
  source 1..22: mol_type = other RNA
attcagcgccgacgggacgtaa

SEQ ID NO: 14157 - RNA, 22 nt, synthetic construct
  misc_feature 1..22: note = HBV-targeting guide sequence portion
  source 1..22: mol_type = other RNA
attccaggatcatcaaccacca

SEQ ID NO: 14158 - RNA, 22 nt, synthetic construct
  misc_feature 1..22: note = HBV-targeting guide sequence portion
  source 1..22: mol_type = other RNA
attcccatcccatcatcctggg

SEQ ID NO: 14159 - RNA, 22 nt, synthetic construct
  misc_feature 1..22: note = HBV-targeting guide sequence portion
  source 1..22: mol_type = other RNA
attcctaggacccctgctcgtg

SEQ ID NO: 14160 - RNA, 22 nt, synthetic construct
  misc_feature 1..22: note = HBV-targeting guide sequence portion
  source 1..22: mol_type = other RNA
attcctatgggagtgggcctca

SEQ ID NO: 14161 - RNA, 22 nt, synthetic construct
  misc_feature 1..22: note = HBV-targeting guide sequence portion
  source 1..22: mol_type = other RNA
attcgcactcctccagcttata

SEQ ID NO: 14162 - RNA, 22 nt, synthetic construct
  misc_feature 1..22: note = HBV-targeting guide sequence portion
  source 1..22: mol_type = other RNA
attcgcagtccccaacctccaa

SEQ ID NO: 14163 - RNA, 22 nt, synthetic construct
  misc_feature 1..22: note = HBV-targeting guide sequence portion
  source 1..22: mol_type = other RNA
attcgggctagggttcacccca

SEQ ID NO: 14164 - RNA, 22 nt, synthetic construct
  misc_feature 1..22: note = HBV-targeting guide sequence portion
  source 1..22: mol_type = other RNA
attcgttgacacactttccaat

SEQ ID NO: 14165 - RNA, 22 nt, synthetic construct
  misc_feature 1..22: note = HBV-targeting guide sequence portion
  source 1..22: mol_type = other RNA
attctcgggactgacaactctg

SEQ ID NO: 14166 - RNA, 22 nt, synthetic construct
  misc_feature 1..22: note = HBV-targeting guide sequence portion
  source 1..22: mol_type = other RNA
attctcttaatttcatgggcta

SEQ ID NO: 14167 - RNA, 22 nt, synthetic construct
  misc_feature 1..22: note = HBV-targeting guide sequence portion
  source 1..22: mol_type = other RNA
attctgccccatgctgtagctc

SEQ ID NO: 14168 - RNA, 22 nt, synthetic construct
  misc_feature 1..22: note = HBV-targeting guide sequence portion
  source 1..22: mol_type = other RNA
attctgtgggtcaccatattct

SEQ ID NO: 14169 - RNA, 22 nt, synthetic construct
  misc_feature 1..22: note = HBV-targeting guide sequence portion
  source 1..22: mol_type = other RNA
attcttctactgtacctgtctt

SEQ ID NO: 14170 - RNA, 22 nt, synthetic construct
  misc_feature 1..22: note = HBV-targeting guide sequence portion
  source 1..22: mol_type = other RNA
attcttgcccaaggtcttacat

SEQ ID NO: 14171 - RNA, 22 nt, synthetic construct
  misc_feature 1..22: note = HBV-targeting guide sequence portion
  source 1..22: mol_type = other RNA
attcttgggaacaagagctaca

SEQ ID NO: 14172 - RNA, 22 nt, synthetic construct
  misc_feature 1..22: note = HBV-targeting guide sequence portion
  source 1..22: mol_type = other RNA
attcttgtcaacaaggaaaacc

SEQ ID NO: 14173 - RNA, 22 nt, synthetic construct
  misc_feature 1..22: note = HBV-targeting guide sequence portion
  source 1..22: mol_type = other RNA
attctttatatgggtcaatgtc

SEQ ID NO: 14174 - RNA, 22 nt, synthetic construct
  misc_feature 1..22: note = HBV-targeting guide sequence portion
  source 1..22: mol_type = other RNA
attctttcccgaccaccagttg

SEQ ID NO: 14175 - RNA, 22 nt, synthetic construct
  misc_feature 1..22: note = HBV-targeting guide sequence portion
  source 1..22: mol_type = other RNA
attctttgattttgtgtatgat

SEQ ID NO: 14176 - RNA, 22 nt, synthetic construct
  misc_feature 1..22: note = HBV-targeting guide sequence portion
  source 1..22: mol_type = other RNA
attctttgctggggagaactaa

SEQ ID NO: 14177 - RNA, 22 nt, synthetic construct
  misc_feature 1..22: note = HBV-targeting guide sequence portion
  source 1..22: mol_type = other RNA
attgaagtcccaatctggattg

SEQ ID NO: 14178 - RNA, 22 nt, synthetic construct
  misc_feature 1..22: note = HBV-targeting guide sequence portion
  source 1..22: mol_type = other RNA
attgaatacatgcatacaaggg

SEQ ID NO: 14179 - RNA, 22 nt, synthetic construct
  misc_feature 1..22: note = HBV-targeting guide sequence portion
  source 1..22: mol_type = other RNA
attgacccatataaagaatttg

SEQ ID NO: 14180 - RNA, 22 nt, synthetic construct
  misc_feature 1..22: note = HBV-targeting guide sequence portion
  source 1..22: mol_type = other RNA
attgacgatatgtgagaggcag

SEQ ID NO: 14181 - RNA, 22 nt, synthetic construct
  misc_feature 1..22: note = HBV-targeting guide sequence portion
  source 1..22: mol_type = other RNA
attgagagaagtccaccacgag

SEQ ID NO: 14182 - RNA, 22 nt, synthetic construct
  misc_feature 1..22: note = HBV-targeting guide sequence portion
  source 1..22: mol_type = other RNA
attgagatccccgagattgaga

SEQ ID NO: 14183 - RNA, 22 nt, synthetic construct
  misc_feature 1..22: note = HBV-targeting guide sequence portion
  source 1..22: mol_type = other RNA
attgagatcttcgtctgcgagg

SEQ ID NO: 14184 - RNA, 22 nt, synthetic construct
  misc_feature 1..22: note = HBV-targeting guide sequence portion
  source 1..22: mol_type = other RNA
attgagatcttctgcgacgcgg

SEQ ID NO: 14185 - RNA, 22 nt, synthetic construct
  misc_feature 1..22: note = HBV-targeting guide sequence portion
  source 1..22: mol_type = other RNA
attgattatgcctgctaggttt

SEQ ID NO: 14186 - RNA, 22 nt, synthetic construct
  misc_feature 1..22: note = HBV-targeting guide sequence portion
  source 1..22: mol_type = other RNA
attgattggaaagtgtgtcaac

SEQ ID NO: 14187 - RNA, 22 nt, synthetic construct
  misc_feature 1..22: note = HBV-targeting guide sequence portion
  source 1..22: mol_type = other RNA
attgattgttggggatcattgc

SEQ ID NO: 14188 - RNA, 22 nt, synthetic construct
  misc_feature 1..22: note = HBV-targeting guide sequence portion
  source 1..22: mol_type = other RNA
attgcagagagtccaagagtcc

SEQ ID NO: 14189 - RNA, 22 nt, synthetic construct
  misc_feature 1..22: note = HBV-targeting guide sequence portion
  source 1..22: mol_type = other RNA
attgccacaaaatcacatcata

SEQ ID NO: 14190 - RNA, 22 nt, synthetic construct
  misc_feature 1..22: note = HBV-targeting guide sequence portion
  source 1..22: mol_type = other RNA
attgctggtggaaagattctgc

SEQ ID NO: 14191 - RNA, 22 nt, synthetic construct
  misc_feature 1..22: note = HBV-targeting guide sequence portion
  source 1..22: mol_type = other RNA
attgcttgcctgagtgcagtat

SEQ ID NO: 14192 - RNA, 22 nt, synthetic construct
  misc_feature 1..22: note = HBV-targeting guide sequence portion
  source 1..22: mol_type = other RNA
attggaaaacaccctcttttcc

SEQ ID NO: 14193 - RNA, 22 nt, synthetic construct
  misc_feature 1..22: note = HBV-targeting guide sequence portion
  source 1..22: mol_type = other RNA
attggaaagtgtgtcaacgaat

SEQ ID NO: 14194 - RNA, 22 nt, synthetic construct
  misc_feature 1..22: note = HBV-targeting guide sequence portion
  source 1..22: mol_type = other RNA
attggaggttggggactgcgaa

SEQ ID NO: 14195 - RNA, 22 nt, synthetic construct
  misc_feature 1..22: note = HBV-targeting guide sequence portion
  source 1..22: mol_type = other RNA
attgggacttcaatcccaacaa

SEQ ID NO: 14196 - RNA, 22 nt, synthetic construct
  misc_feature 1..22: note = HBV-targeting guide sequence portion
  source 1..22: mol_type = other RNA
attggggaccctgcgctgaaca

SEQ ID NO: 14197 - RNA, 22 nt, synthetic construct
  misc_feature 1..22: note = HBV-targeting guide sequence portion
  source 1..22: mol_type = other RNA
attgggggccaagtctgtacag

SEQ ID NO: 14198 - RNA, 22 nt, synthetic construct
  misc_feature 1..22: note = HBV-targeting guide sequence portion
  source 1..22: mol_type = other RNA
attggtaacagcggtataaagg

SEQ ID NO: 14199 - RNA, 22 nt, synthetic construct
  misc_feature 1..22: note = HBV-targeting guide sequence portion
  source 1..22: mol_type = other RNA
attggtagaggcaggaggcgga

SEQ ID NO: 14200 - RNA, 22 nt, synthetic construct
  misc_feature 1..22: note = HBV-targeting guide sequence portion
  source 1..22: mol_type = other RNA
attggtctgcgcaccagcacca

SEQ ID NO: 14201 - RNA, 22 nt, synthetic construct
  misc_feature 1..22: note = HBV-targeting guide sequence portion
  source 1..22: mol_type = other RNA
attggtgggcgttcacggtggt

SEQ ID NO: 14202 - RNA, 22 nt, synthetic construct
  misc_feature 1..22: note = HBV-targeting guide sequence portion
  source 1..22: mol_type = other RNA
attgtgaggattcttgtcaaca

SEQ ID NO: 14203 - RNA, 22 nt, synthetic construct
  misc_feature 1..22: note = HBV-targeting guide sequence portion
  source 1..22: mol_type = other RNA
attgtgggtcttctgggttttg

SEQ ID NO: 14204 - RNA, 22 nt, synthetic construct
  misc_feature 1..22: note = HBV-targeting guide sequence portion
  source 1..22: mol_type = other RNA
attgtggtttcacatttcttgt

SEQ ID NO: 14205 - RNA, 22 nt, synthetic construct
  misc_feature 1..22: note = HBV-targeting guide sequence portion
  source 1..22: mol_type = other RNA
attgtgtaaaaggggcagcaaa

SEQ ID NO: 14206 - RNA, 22 nt, synthetic construct
  misc_feature 1..22: note = HBV-targeting guide sequence portion
  source 1..22: mol_type = other RNA
attgttcacctcaccatactgc

SEQ ID NO: 14207 - RNA, 22 nt, synthetic construct
  misc_feature 1..22: note = HBV-targeting guide sequence portion
  source 1..22: mol_type = other RNA
attgttggagtttgctctgaag

SEQ ID NO: 14208 - RNA, 22 nt, synthetic construct
  misc_feature 1..22: note = HBV-targeting guide sequence portion
  source 1..22: mol_type = other RNA
attgttggggatcattgccaca

SEQ ID NO: 14209 - RNA, 22 nt, synthetic construct
  misc_feature 1..22: note = HBV-targeting guide sequence portion
  source 1..22: mol_type = other RNA
attgtttacacagaaaggcctt

SEQ ID NO: 14210 - RNA, 22 nt, synthetic construct
  misc_feature 1..22: note = HBV-targeting guide sequence portion
  source 1..22: mol_type = other RNA
atttaaaccctaacaaaacaaa

SEQ ID NO: 14211 - RNA, 22 nt, synthetic construct
  misc_feature 1..22: note = HBV-targeting guide sequence portion
  source 1..22: mol_type = other RNA
atttacacactctatggaaggc

SEQ ID NO: 14212 - RNA, 22 nt, synthetic construct
  misc_feature 1..22: note = HBV-targeting guide sequence portion
  source 1..22: mol_type = other RNA
atttagaagatcaagcatctag

SEQ ID NO: 14213 - RNA, 22 nt, synthetic construct
  misc_feature 1..22: note = HBV-targeting guide sequence portion
  source 1..22: mol_type = other RNA
atttaggataaaacctagcagg

SEQ ID NO: 14214 - RNA, 22 nt, synthetic construct
  misc_feature 1..22: note = HBV-targeting guide sequence portion
  source 1..22: mol_type = other RNA
atttatgcctacagcctcctag

SEQ ID NO: 14215 - RNA, 22 nt, synthetic construct
  misc_feature 1..22: note = HBV-targeting guide sequence portion
  source 1..22: mol_type = other RNA
atttcaaccgtcttttctcatt

SEQ ID NO: 14216 - RNA, 22 nt, synthetic construct
  misc_feature 1..22: note = HBV-targeting guide sequence portion
  source 1..22: mol_type = other RNA
atttcatgggctatgtcattga

SEQ ID NO: 14217 - RNA, 22 nt, synthetic construct
  misc_feature 1..22: note = HBV-targeting guide sequence portion
  source 1..22: mol_type = other RNA
atttcccaccttatgagtccaa

SEQ ID NO: 14218 - RNA, 22 nt, synthetic construct
  misc_feature 1..22: note = HBV-targeting guide sequence portion
  source 1..22: mol_type = other RNA
atttcttgtcttacttttggaa

SEQ ID NO: 14219 - RNA, 22 nt, synthetic construct
  misc_feature 1..22: note = HBV-targeting guide sequence portion
  source 1..22: mol_type = other RNA
atttgcgggagaggacaacaga

SEQ ID NO: 14220 - RNA, 22 nt, synthetic construct
  misc_feature 1..22: note = HBV-targeting guide sequence portion
  source 1..22: mol_type = other RNA
atttgctggcaaggtttgcatt

SEQ ID NO: 14221 - RNA, 22 nt, synthetic construct
  misc_feature 1..22: note = HBV-targeting guide sequence portion
  source 1..22: mol_type = other RNA
atttggagctactgtggagtta

SEQ ID NO: 14222 - RNA, 22 nt, synthetic construct
  misc_feature 1..22: note = HBV-targeting guide sequence portion
  source 1..22: mol_type = other RNA
atttggtgaatttaggataaaa

SEQ ID NO: 14223 - RNA, 22 nt, synthetic construct
  misc_feature 1..22: note = HBV-targeting guide sequence portion
  source 1..22: mol_type = other RNA
atttggtggtctataagctgga

SEQ ID NO: 14224 - RNA, 22 nt, synthetic construct
  misc_feature 1..22: note = HBV-targeting guide sequence portion
  source 1..22: mol_type = other RNA
atttggtgtcttttggagtgtg

SEQ ID NO: 14225 - RNA, 22 nt, synthetic construct
  misc_feature 1..22: note = HBV-targeting guide sequence portion
  source 1..22: mol_type = other RNA
atttgttcagtggttcgtaggg

SEQ ID NO: 14226 - RNA, 22 nt, synthetic construct
  misc_feature 1..22: note = HBV-targeting guide sequence portion
  source 1..22: mol_type = other RNA
attttacggggctttattcttc

SEQ ID NO: 14227 - RNA, 22 nt, synthetic construct
  misc_feature 1..22: note = HBV-targeting guide sequence portion
  source 1..22: mol_type = other RNA
attttccgaaagcccaggatga

SEQ ID NO: 14228 - RNA, 22 nt, synthetic construct
  misc_feature 1..22: note = HBV-targeting guide sequence portion
  source 1..22: mol_type = other RNA
attttctagggggaactaccgt

SEQ ID NO: 14229 - RNA, 22 nt, synthetic construct
  misc_feature 1..22: note = HBV-targeting guide sequence portion
  source 1..22: mol_type = other RNA
attttcttttgtctttgggtgt

SEQ ID NO: 14230 - RNA, 22 nt, synthetic construct
  misc_feature 1..22: note = HBV-targeting guide sequence portion
  source 1..22: mol_type = other RNA
attttggccaagacacacggta

SEQ ID NO: 14231 - RNA, 22 nt, synthetic construct
  misc_feature 1..22: note = HBV-targeting guide sequence portion
  source 1..22: mol_type = other RNA
attttgtggcaatgatccccaa

SEQ ID NO: 14232 - RNA, 22 nt, synthetic construct
  misc_feature 1..22: note = HBV-targeting guide sequence portion
  source 1..22: mol_type = other RNA
attttgtgtatgatgtgatttt

SEQ ID NO: 14233 - RNA, 22 nt, synthetic construct
  misc_feature 1..22: note = HBV-targeting guide sequence portion
  source 1..22: mol_type = other RNA
attttttgataatatcttggtg

SEQ ID NO: 14234 - RNA, 22 nt, synthetic construct
  misc_feature 1..22: note = HBV-targeting guide sequence portion
  source 1..22: mol_type = other RNA
caaaaaatgtgaacagtttgta

SEQ ID NO: 14235 - RNA, 22 nt, synthetic construct
  misc_feature 1..22: note = HBV-targeting guide sequence portion
  source 1..22: mol_type = other RNA
caaaaacgagagtaactccaca

SEQ ID NO: 14236 - RNA, 22 nt, synthetic construct
  misc_feature 1..22: note = HBV-targeting guide sequence portion
  source 1..22: mol_type = other RNA
caaaacaaagagatggggttat

SEQ ID NO: 14237 - RNA, 22 nt, synthetic construct
  misc_feature 1..22: note = HBV-targeting guide sequence portion
  source 1..22: mol_type = other RNA
caaaacaagcggctaggagttc

SEQ ID NO: 14238 - RNA, 22 nt, synthetic construct
  misc_feature 1..22: note = HBV-targeting guide sequence portion
  source 1..22: mol_type = other RNA
caaaacccagaagacccacaat

SEQ ID NO: 14239 - RNA, 22 nt, synthetic construct
  misc_feature 1..22: note = HBV-targeting guide sequence portion
  source 1..22: mol_type = other RNA
caaaaccttcggatggaaactg

SEQ ID NO: 14240 - RNA, 22 nt, synthetic construct
  misc_feature 1..22: note = HBV-targeting guide sequence portion
  source 1..22: mol_type = other RNA
caaaagaaaattggtaacagcg

SEQ ID NO: 14241 - RNA, 22 nt, synthetic construct
  misc_feature 1..22: note = HBV-targeting guide sequence portion
  source 1..22: mol_type = other RNA
caaaagacaccaaatactctag

SEQ ID NO: 14242 - RNA, 22 nt, synthetic construct
  misc_feature 1..22: note = HBV-targeting guide sequence portion
  source 1..22: mol_type = other RNA
caaaaggcctccgtgcggtggg

SEQ ID NO: 14243 - RNA, 22 nt, synthetic construct
  misc_feature 1..22: note = HBV-targeting guide sequence portion
  source 1..22: mol_type = other RNA
caaaagtaagacaagaaatgtg

SEQ ID NO: 14244 - RNA, 22 nt, synthetic construct
  misc_feature 1..22: note = HBV-targeting guide sequence portion
  source 1..22: mol_type = other RNA
caaaatcaaagaatgtttcaga

SEQ ID NO: 14245 - RNA, 22 nt, synthetic construct
  misc_feature 1..22: note = HBV-targeting guide sequence portion
  source 1..22: mol_type = other RNA
caaaatcacatcatacacaaaa

SEQ ID NO: 14246 - RNA, 22 nt, synthetic construct
  misc_feature 1..22: note = HBV-targeting guide sequence portion
  source 1..22: mol_type = other RNA
caaaattcgcagtccccaacct

SEQ ID NO: 14247 - RNA, 22 nt, synthetic construct
  misc_feature 1..22: note = HBV-targeting guide sequence portion
  source 1..22: mol_type = other RNA
caaacacttggcacagacctgg

SEQ ID NO: 14248 - RNA, 22 nt, synthetic construct
  misc_feature 1..22: note = HBV-targeting guide sequence portion
  source 1..22: mol_type = other RNA
caaacagtctttgaagtatgcc

SEQ ID NO: 14249 - RNA, 22 nt, synthetic construct
  misc_feature 1..22: note = HBV-targeting guide sequence portion
  source 1..22: mol_type = other RNA
caaacagtgggggaaagcccta

SEQ ID NO: 14250 - RNA, 22 nt, synthetic construct
  misc_feature 1..22: note = HBV-targeting guide sequence portion
  source 1..22: mol_type = other RNA
caaacattctcgggactgacaa

SEQ ID NO: 14251 - RNA, 22 nt, synthetic construct
  misc_feature 1..22: note = HBV-targeting guide sequence portion
  source 1..22: mol_type = other RNA
caaaccttgccagcaaatccgc

SEQ ID NO: 14252 - RNA, 22 nt, synthetic construct
  misc_feature 1..22: note = HBV-targeting guide sequence portion
  source 1..22: mol_type = other RNA
caaactagacactatttacaca

SEQ ID NO: 14253 - RNA, 22 nt, synthetic construct
  misc_feature 1..22: note = HBV-targeting guide sequence portion
  source 1..22: mol_type = other RNA
caaactccaacaatccagattg

SEQ ID NO: 14254 - RNA, 22 nt, synthetic construct
  misc_feature 1..22: note = HBV-targeting guide sequence portion
  source 1..22: mol_type = other RNA
caaactctgcaagatcccagag

SEQ ID NO: 14255 - RNA, 22 nt, synthetic construct
  misc_feature 1..22: note = HBV-targeting guide sequence portion
  source 1..22: mol_type = other RNA
caaactgttcacattttttgat

SEQ ID NO: 14256 - RNA, 22 nt, synthetic construct
  misc_feature 1..22: note = HBV-targeting guide sequence portion
  source 1..22: mol_type = other RNA
caaagaatgtttcagaaaactc

SEQ ID NO: 14257 - RNA, 22 nt, synthetic construct
  misc_feature 1..22: note = HBV-targeting guide sequence portion
  source 1..22: mol_type = other RNA
caaagaattgcttgcctgagtg

SEQ ID NO: 14258 - RNA, 22 nt, synthetic construct
  misc_feature 1..22: note = HBV-targeting guide sequence portion
  source 1..22: mol_type = other RNA
caaagacaaaagaaaattggta

SEQ ID NO: 14259 - RNA, 22 nt, synthetic construct
  misc_feature 1..22: note = HBV-targeting guide sequence portion
  source 1..22: mol_type = other RNA
caaagactgtttgtttaaagac

SEQ ID NO: 14260 - RNA, 22 nt, synthetic construct
  misc_feature 1..22: note = HBV-targeting guide sequence portion
  source 1..22: mol_type = other RNA
caaagagatggggttattctct

SEQ ID NO: 14261 - RNA, 22 nt, synthetic construct
  misc_feature 1..22: note = HBV-targeting guide sequence portion
  source 1..22: mol_type = other RNA
caaagatcattaatctaatctc

SEQ ID NO: 14262 - RNA, 22 nt, synthetic construct
  misc_feature 1..22: note = HBV-targeting guide sequence portion
  source 1..22: mol_type = other RNA
caaaggacgtcccgcgcaggat

SEQ ID NO: 14263 - RNA, 22 nt, synthetic construct
  misc_feature 1..22: note = HBV-targeting guide sequence portion
  source 1..22: mol_type = other RNA
caaatactctaggaccgtttct

SEQ ID NO: 14264 - RNA, 22 nt, synthetic construct
  misc_feature 1..22: note = HBV-targeting guide sequence portion
  source 1..22: mol_type = other RNA
caaatacttgcccttggataag

SEQ ID NO: 14265 - RNA, 22 nt, synthetic construct
  misc_feature 1..22: note = HBV-targeting guide sequence portion
  source 1..22: mol_type = other RNA
caaatatacatcgttcccatgg

SEQ ID NO: 14266 - RNA, 22 nt, synthetic construct
  misc_feature 1..22: note = HBV-targeting guide sequence portion
  source 1..22: mol_type = other RNA
caaatccgcctcctgcctctac

SEQ ID NO: 14267 - RNA, 22 nt, synthetic construct
  misc_feature 1..22: note = HBV-targeting guide sequence portion
  source 1..22: mol_type = other RNA
caaatgcccctatcctatcaac

SEQ ID NO: 14268 - RNA, 22 nt, synthetic construct
  misc_feature 1..22: note = HBV-targeting guide sequence portion
  source 1..22: mol_type = other RNA
caaatggcactagtaaactgag

SEQ ID NO: 14269 - RNA, 22 nt, synthetic construct
  misc_feature 1..22: note = HBV-targeting guide sequence portion
  source 1..22: mol_type = other RNA
caaattctttatatgggtcaat

SEQ ID NO: 14270 - RNA, 22 nt, synthetic construct
  misc_feature 1..22: note = HBV-targeting guide sequence portion
  source 1..22: mol_type = other RNA
caacaagaagatgaggcatagc

SEQ ID NO: 14271 - RNA, 22 nt, synthetic construct
  misc_feature 1..22: note = HBV-targeting guide sequence portion
  source 1..22: mol_type = other RNA
caacaaggaaaaccccgcctgt

SEQ ID NO: 14272 - RNA, 22 nt, synthetic construct
  misc_feature 1..22: note = HBV-targeting guide sequence portion
  source 1..22: mol_type = other RNA
caacaaggatccctggccagac

SEQ ID NO: 14273 - RNA, 22 nt, synthetic construct
  misc_feature 1..22: note = HBV-targeting guide sequence portion
  source 1..22: mol_type = other RNA
caacaaggtaggagctggagca

SEQ ID NO: 14274 - RNA, 22 nt, synthetic construct
  misc_feature 1..22: note = HBV-targeting guide sequence portion
  source 1..22: mol_type = other RNA
caacaatcaatgacatagccca

SEQ ID NO: 14275 - RNA, 22 nt, synthetic construct
  misc_feature 1..22: note = HBV-targeting guide sequence portion
  source 1..22: mol_type = other RNA
caacaatccagattgggacttc

SEQ ID NO: 14276 - RNA, 22 nt, synthetic construct
  misc_feature 1..22: note = HBV-targeting guide sequence portion
  source 1..22: mol_type = other RNA
caacacaagtctccggaagtgt

SEQ ID NO: 14277 - RNA, 22 nt, synthetic construct
  misc_feature 1..22: note = HBV-targeting guide sequence portion
  source 1..22: mol_type = other RNA
caacacatagcgcctcattctg

SEQ ID NO: 14278 - RNA, 22 nt, synthetic construct
  misc_feature 1..22: note = HBV-targeting guide sequence portion
  source 1..22: mol_type = other RNA
caacactcatatgggcctaaag

SEQ ID NO: 14279 - RNA, 22 nt, synthetic construct
  misc_feature 1..22: note = HBV-targeting guide sequence portion
  source 1..22: mol_type = other RNA
caacacttccggagacttgtgt

SEQ ID NO: 14280 - RNA, 22 nt, synthetic construct
  misc_feature 1..22: note = HBV-targeting guide sequence portion
  source 1..22: mol_type = other RNA
caacagagttgtcagtcccgag

SEQ ID NO: 14281 - RNA, 22 nt, synthetic construct
  misc_feature 1..22: note = HBV-targeting guide sequence portion
  source 1..22: mol_type = other RNA
caacaggagggatacatagagg

SEQ ID NO: 14282 - RNA, 22 nt, synthetic construct
  misc_feature 1..22: note = HBV-targeting guide sequence portion
  source 1..22: mol_type = other RNA
caaccaccagcacgggaccctg

SEQ ID NO: 14283 - RNA, 22 nt, synthetic construct
  misc_feature 1..22: note = HBV-targeting guide sequence portion
  source 1..22: mol_type = other RNA
caaccagtgggggttgcatcag

SEQ ID NO: 14284 - RNA, 22 nt, synthetic construct
  misc_feature 1..22: note = HBV-targeting guide sequence portion
  source 1..22: mol_type = other RNA
caacccccactggttggggctt

SEQ ID NO: 14285 - RNA, 22 nt, synthetic construct
  misc_feature 1..22: note = HBV-targeting guide sequence portion
  source 1..22: mol_type = other RNA
caaccgtcttttctcattaact

SEQ ID NO: 14286 - RNA, 22 nt, synthetic construct
  misc_feature 1..22: note = HBV-targeting guide sequence portion
  source 1..22: mol_type = other RNA
caacctccaatcactcaccaac

SEQ ID NO: 14287 - RNA, 22 nt, synthetic construct
  misc_feature 1..22: note = HBV-targeting guide sequence portion
  source 1..22: mol_type = other RNA
caacctcctgtcctccaacttg

SEQ ID NO: 14288 - RNA, 22 nt, synthetic construct
  misc_feature 1..22: note = HBV-targeting guide sequence portion
  source 1..22: mol_type = other RNA
caaccttccaccaaactctgca

SEQ ID NO: 14289 - RNA, 22 nt, synthetic construct
  misc_feature 1..22: note = HBV-targeting guide sequence portion
  source 1..22: mol_type = other RNA
caacgaattgtgggtcttctgg

SEQ ID NO: 14290 - RNA, 22 nt, synthetic construct
  misc_feature 1..22: note = HBV-targeting guide sequence portion
  source 1..22: mol_type = other RNA
caacgaccgaccttgaggcata

SEQ ID NO: 14291 - RNA, 22 nt, synthetic construct
  misc_feature 1..22: note = HBV-targeting guide sequence portion
  source 1..22: mol_type = other RNA
caacggccaggtctgtgccaag

SEQ ID NO: 14292 - RNA, 22 nt, synthetic construct
  misc_feature 1..22: note = HBV-targeting guide sequence portion
  source 1..22: mol_type = other RNA
caacggggtaaaggttcaggta

SEQ ID NO: 14293 - RNA, 22 nt, synthetic construct
  misc_feature 1..22: note = HBV-targeting guide sequence portion
  source 1..22: mol_type = other RNA
caactattgtggtttcacattt

SEQ ID NO: 14294 - RNA, 22 nt, synthetic construct
  misc_feature 1..22: note = HBV-targeting guide sequence portion
  source 1..22: mol_type = other RNA
caactcctcccagtctttaaac

SEQ ID NO: 14295 - RNA, 22 nt, synthetic construct
  misc_feature 1..22: note = HBV-targeting guide sequence portion
  source 1..22: mol_type = other RNA
caactctgttgtcctctcccgc

SEQ ID NO: 14296 - RNA, 22 nt, synthetic construct
  misc_feature 1..22: note = HBV-targeting guide sequence portion
  source 1..22: mol_type = other RNA
caactggatcctgcgcgggacg

SEQ ID NO: 14297 - RNA, 22 nt, synthetic construct
  misc_feature 1..22: note = HBV-targeting guide sequence portion
  source 1..22: mol_type = other RNA
caactggtggtcgggaaagaat

SEQ ID NO: 14298 - RNA, 22 nt, synthetic construct
  misc_feature 1..22: note = HBV-targeting guide sequence portion
  source 1..22: mol_type = other RNA
caacttacaaggcctttctgtg

SEQ ID NO: 14299 - RNA, 22 nt, synthetic construct
  misc_feature 1..22: note = HBV-targeting guide sequence portion
  source 1..22: mol_type = other RNA
caacttgtcctggttatcgctg

SEQ ID NO: 14300 - RNA, 22 nt, synthetic construct
  misc_feature 1..22: note = HBV-targeting guide sequence portion
  source 1..22: mol_type = other RNA
caactttttcacctctgcctaa

SEQ ID NO: 14301 - RNA, 22 nt, synthetic construct
  misc_feature 1..22: note = HBV-targeting guide sequence portion
  source 1..22: mol_type = other RNA
caagaaatgtgaaaccacaata

SEQ ID NO: 14302 - RNA, 22 nt, synthetic construct
  misc_feature 1..22: note = HBV-targeting guide sequence portion
  source 1..22: mol_type = other RNA
caagaagatgaggcatagcagc

SEQ ID NO: 14303 - RNA, 22 nt, synthetic construct
  misc_feature 1..22: note = HBV-targeting guide sequence portion
  source 1..22: mol_type = other RNA
caagaatatggtgacccacaga

SEQ ID NO: 14304 - RNA, 22 nt, synthetic construct
  misc_feature 1..22: note = HBV-targeting guide sequence portion
  source 1..22: mol_type = other RNA
caagaatcctcacaataccgca

SEQ ID NO: 14305 - RNA, 22 nt, synthetic construct
  misc_feature 1..22: note = HBV-targeting guide sequence portion
  source 1..22: mol_type = other RNA
caagaattggtgggcgttcacg

SEQ ID NO: 14306 - RNA, 22 nt, synthetic construct
  misc_feature 1..22: note = HBV-targeting guide sequence portion
  source 1..22: mol_type = other RNA
caagacacacggtagttccccc

SEQ ID NO: 14307 - RNA, 22 nt, synthetic construct
  misc_feature 1..22: note = HBV-targeting guide sequence portion
  source 1..22: mol_type = other RNA
caagagaaacgggctgaggccc

SEQ ID NO: 14308 - RNA, 22 nt, synthetic construct
  misc_feature 1..22: note = HBV-targeting guide sequence portion
  source 1..22: mol_type = other RNA
caagagatgattaggcagaggt

SEQ ID NO: 14309 - RNA, 22 nt, synthetic construct
  misc_feature 1..22: note = HBV-targeting guide sequence portion
  source 1..22: mol_type = other RNA
caagagctacagcatggggcag

SEQ ID NO: 14310 - RNA, 22 nt, synthetic construct
  misc_feature 1..22: note = HBV-targeting guide sequence portion
  source 1..22: mol_type = other RNA
caagagtcctcttatgtaagac

SEQ ID NO: 14311 - RNA, 22 nt, synthetic construct
  misc_feature 1..22: note = HBV-targeting guide sequence portion
  source 1..22: mol_type = other RNA
caagatattatcaaaaaatgtg

SEQ ID NO: 14312 - RNA, 22 nt, synthetic construct
  misc_feature 1..22: note = HBV-targeting guide sequence portion
  source 1..22: mol_type = other RNA
caagatcccagagtgagaggcc

SEQ ID NO: 14313 - RNA, 22 nt, synthetic construct
  misc_feature 1..22: note = HBV-targeting guide sequence portion
  source 1..22: mol_type = other RNA
caagatgctgtacagacttggc

SEQ ID NO: 14314 - RNA, 22 nt, synthetic construct
  misc_feature 1..22: note = HBV-targeting guide sequence portion
  source 1..22: mol_type = other RNA
caagcaattctttgctggggag

SEQ ID NO: 14315 - RNA, 22 nt, synthetic construct
  misc_feature 1..22: note = HBV-targeting guide sequence portion
  source 1..22: mol_type = other RNA
caagcatctagggacctagtag

SEQ ID NO: 14316 - RNA, 22 nt, synthetic construct
  misc_feature 1..22: note = HBV-targeting guide sequence portion
  source 1..22: mol_type = other RNA
caagccccaaccagtgggggtt

SEQ ID NO: 14317 - RNA, 22 nt, synthetic construct
  misc_feature 1..22: note = HBV-targeting guide sequence portion
  source 1..22: mol_type = other RNA
caagcctccaagctgtgccttg

SEQ ID NO: 14318 - RNA, 22 nt, synthetic construct
  misc_feature 1..22: note = HBV-targeting guide sequence portion
  source 1..22: mol_type = other RNA
caagcggcctcgagatgggtcg

SEQ ID NO: 14319 - RNA, 22 nt, synthetic construct
  misc_feature 1..22: note = HBV-targeting guide sequence portion
  source 1..22: mol_type = other RNA
caagcggctaggagttccgcag

SEQ ID NO: 14320 - RNA, 22 nt, synthetic construct
  misc_feature 1..22: note = HBV-targeting guide sequence portion
  source 1..22: mol_type = other RNA
caagctgtgccttgggtggctt

SEQ ID NO: 14321 - RNA, 22 nt, synthetic construct
  misc_feature 1..22: note = HBV-targeting guide sequence portion
  source 1..22: mol_type = other RNA
caaggaaaaccccgcctgtaac

SEQ ID NO: 14322 - RNA, 22 nt, synthetic construct
  misc_feature 1..22: note = HBV-targeting guide sequence portion
  source 1..22: mol_type = other RNA
caaggaacctctatgtatccct

SEQ ID NO: 14323 - RNA, 22 nt, synthetic construct
  misc_feature 1..22: note = HBV-targeting guide sequence portion
  source 1..22: mol_type = other RNA
caaggatccctggccagacgcc

SEQ ID NO: 14324 - RNA, 22 nt, synthetic construct
  misc_feature 1..22: note = HBV-targeting guide sequence portion
  source 1..22: mol_type = other RNA
caaggcacagcttggaggcttg

SEQ ID NO: 14325 - RNA, 22 nt, synthetic construct
  misc_feature 1..22: note = HBV-targeting guide sequence portion
  source 1..22: mol_type = other RNA
caaggcatcccgatacagagct

SEQ ID NO: 14326 - RNA, 22 nt, synthetic construct
  misc_feature 1..22: note = HBV-targeting guide sequence portion
  source 1..22: mol_type = other RNA
caaggcctttctgtgtaaacaa

SEQ ID NO: 14327 - RNA, 22 nt, synthetic construct
  misc_feature 1..22: note = HBV-targeting guide sequence portion
  source 1..22: mol_type = other RNA
caagggatactaacattgagat

SEQ ID NO: 14328 - RNA, 22 nt, synthetic construct
  misc_feature 1..22: note = HBV-targeting guide sequence portion
  source 1..22: mol_type = other RNA
caagggcaagtatttggtgaat

SEQ ID NO: 14329 - RNA, 22 nt, synthetic construct
  misc_feature 1..22: note = HBV-targeting guide sequence portion
  source 1..22: mol_type = other RNA
caagggcattaaagcaggataa

SEQ ID NO: 14330 - RNA, 22 nt, synthetic construct
  misc_feature 1..22: note = HBV-targeting guide sequence portion
  source 1..22: mol_type = other RNA
caaggtaggagctggagcattc

SEQ ID NO: 14331 - RNA, 22 nt, synthetic construct
  misc_feature 1..22: note = HBV-targeting guide sequence portion
  source 1..22: mol_type = other RNA
caaggtatgtttcccgtctgtc

SEQ ID NO: 14332 - RNA, 22 nt, synthetic construct
  misc_feature 1..22: note = HBV-targeting guide sequence portion
  source 1..22: mol_type = other RNA
caaggtcggtcgttgacattgc

SEQ ID NO: 14333 - RNA, 22 nt, synthetic construct
  misc_feature 1..22: note = HBV-targeting guide sequence portion
  source 1..22: mol_type = other RNA
caaggtcttacataagaggact

SEQ ID NO: 14334 - RNA, 22 nt, synthetic construct
  misc_feature 1..22: note = HBV-targeting guide sequence portion
  source 1..22: mol_type = other RNA
caaggtttgcattatgccctga

SEQ ID NO: 14335 - RNA, 22 nt, synthetic construct
  misc_feature 1..22: note = HBV-targeting guide sequence portion
  source 1..22: mol_type = other RNA
caagtatttggtgaatttagga

SEQ ID NO: 14336 - RNA, 22 nt, synthetic construct
  misc_feature 1..22: note = HBV-targeting guide sequence portion
  source 1..22: mol_type = other RNA
caagtctccggaagtgttgata

SEQ ID NO: 14337 - RNA, 22 nt, synthetic construct
  misc_feature 1..22: note = HBV-targeting guide sequence portion
  source 1..22: mol_type = other RNA
caagtctgtacagcatcttgag

SEQ ID NO: 14338 - RNA, 22 nt, synthetic construct
  misc_feature 1..22: note = HBV-targeting guide sequence portion
  source 1..22: mol_type = other RNA
caagtgtttgctgatgcaaccc

SEQ ID NO: 14339 - RNA, 22 nt, synthetic construct
  misc_feature 1..22: note = HBV-targeting guide sequence portion
  source 1..22: mol_type = other RNA
caagttggaggacaggaggttg

SEQ ID NO: 14340 - RNA, 22 nt, synthetic construct
  misc_feature 1..22: note = HBV-targeting guide sequence portion
  source 1..22: mol_type = other RNA
caataccacatcatccatataa

SEQ ID NO: 14341 - RNA, 22 nt, synthetic construct
  misc_feature 1..22: note = HBV-targeting guide sequence portion
  source 1..22: mol_type = other RNA
caataccgcagagtctagactc

SEQ ID NO: 14342 - RNA, 22 nt, synthetic construct
  misc_feature 1..22: note = HBV-targeting guide sequence portion
  source 1..22: mol_type = other RNA
caatacctgaacctttaccccg

SEQ ID NO: 14343 - RNA, 22 nt, synthetic construct
  misc_feature 1..22: note = HBV-targeting guide sequence portion
  source 1..22: mol_type = other RNA
caataggcctgttaaccgggag

SEQ ID NO: 14344 - RNA, 22 nt, synthetic construct
  misc_feature 1..22: note = HBV-targeting guide sequence portion
  source 1..22: mol_type = other RNA
caatagttgtctgaactttagg

SEQ ID NO: 14345 - RNA, 22 nt, synthetic construct
  misc_feature 1..22: note = HBV-targeting guide sequence portion
  source 1..22: mol_type = other RNA
caatcaataggcctgttaaccg

SEQ ID NO: 14346 - RNA, 22 nt, synthetic construct
  misc_feature 1..22: note = HBV-targeting guide sequence portion
  source 1..22: mol_type = other RNA
caatcaatgacatagcccatga

SEQ ID NO: 14347 - RNA, 22 nt, synthetic construct
  misc_feature 1..22: note = HBV-targeting guide sequence portion
  source 1..22: mol_type = other RNA
caatcactcaccaacctcctgt

SEQ ID NO: 14348 - RNA, 22 nt, synthetic construct
  misc_feature 1..22: note = HBV-targeting guide sequence portion
  source 1..22: mol_type = other RNA
caatccagattgggacttcaat

SEQ ID NO: 14349 - RNA, 22 nt, synthetic construct
  misc_feature 1..22: note = HBV-targeting guide sequence portion
  source 1..22: mol_type = other RNA
caatcccaacaaggatccctgg

SEQ ID NO: 14350 - RNA, 22 nt, synthetic construct
  misc_feature 1..22: note = HBV-targeting guide sequence portion
  source 1..22: mol_type = other RNA
caatcctcgagaagattgacga

SEQ ID NO: 14351 - RNA, 22 nt, synthetic construct
  misc_feature 1..22: note = HBV-targeting guide sequence portion
  source 1..22: mol_type = other RNA
caatcctctgggattctttccc

SEQ ID NO: 14352 - RNA, 22 nt, synthetic construct
  misc_feature 1..22: note = HBV-targeting guide sequence portion
  source 1..22: mol_type = other RNA
caatcgccagtcaggacggcag

SEQ ID NO: 14353 - RNA, 22 nt, synthetic construct
  misc_feature 1..22: note = HBV-targeting guide sequence portion
  source 1..22: mol_type = other RNA
caatcgccgcgtcgcagaagat

SEQ ID NO: 14354 - RNA, 22 nt, synthetic construct
  misc_feature 1..22: note = HBV-targeting guide sequence portion
  source 1..22: mol_type = other RNA
caatctaagcaggctttcactt

SEQ ID NO: 14355 - RNA, 22 nt, synthetic construct
  misc_feature 1..22: note = HBV-targeting guide sequence portion
  source 1..22: mol_type = other RNA
caatctcggggatctcaatgtt

SEQ ID NO: 14356 - RNA, 22 nt, synthetic construct
  misc_feature 1..22: note = HBV-targeting guide sequence portion
  source 1..22: mol_type = other RNA
caatctggattgttggagtttg

SEQ ID NO: 14357 - RNA, 22 nt, synthetic construct
  misc_feature 1..22: note = HBV-targeting guide sequence portion
  source 1..22: mol_type = other RNA
caatcttctcgaggattgggga

SEQ ID NO: 14358 - RNA, 22 nt, synthetic construct
  misc_feature 1..22: note = HBV-targeting guide sequence portion
  source 1..22: mol_type = other RNA
caatgacatagcccatgaaatt

SEQ ID NO: 14359 - RNA, 22 nt, synthetic construct
  misc_feature 1..22: note = HBV-targeting guide sequence portion
  source 1..22: mol_type = other RNA
caatgagggttaaagacaggta

SEQ ID NO: 14360 - RNA, 22 nt, synthetic construct
  misc_feature 1..22: note = HBV-targeting guide sequence portion
  source 1..22: mol_type = other RNA
caatgatccccaacaatcaatg

SEQ ID NO: 14361 - RNA, 22 nt, synthetic construct
  misc_feature 1..22: note = HBV-targeting guide sequence portion
  source 1..22: mol_type = other RNA
caatgctcaggagactccaagg

SEQ ID NO: 14362 - RNA, 22 nt, synthetic construct
  misc_feature 1..22: note = HBV-targeting guide sequence portion
  source 1..22: mol_type = other RNA
caatgtcaacgaccgaccttga

SEQ ID NO: 14363 - RNA, 22 nt, synthetic construct
  misc_feature 1..22: note = HBV-targeting guide sequence portion
  source 1..22: mol_type = other RNA
caatgtccatgccctaaagcca

SEQ ID NO: 14364 - RNA, 22 nt, synthetic construct
  misc_feature 1..22: note = HBV-targeting guide sequence portion
  source 1..22: mol_type = other RNA
caatgtggttatcctgctttaa

SEQ ID NO: 14365 - RNA, 22 nt, synthetic construct
  misc_feature 1..22: note = HBV-targeting guide sequence portion
  source 1..22: mol_type = other RNA
caatgttagtatcccttggact

SEQ ID NO: 14366 - RNA, 22 nt, synthetic construct
  misc_feature 1..22: note = HBV-targeting guide sequence portion
  source 1..22: mol_type = other RNA
caattcgttgacacactttcca

SEQ ID NO: 14367 - RNA, 22 nt, synthetic construct
  misc_feature 1..22: note = HBV-targeting guide sequence portion
  source 1..22: mol_type = other RNA
caattcttgcccaaggtcttac

SEQ ID NO: 14368 - RNA, 22 nt, synthetic construct
  misc_feature 1..22: note = HBV-targeting guide sequence portion
  source 1..22: mol_type = other RNA
caattctttgctggggagaact

SEQ ID NO: 14369 - RNA, 22 nt, synthetic construct
  misc_feature 1..22: note = HBV-targeting guide sequence portion
  source 1..22: mol_type = other RNA
caatttatgcctacagcctcct

SEQ ID NO: 14370 - RNA, 22 nt, synthetic construct
  misc_feature 1..22: note = HBV-targeting guide sequence portion
  source 1..22: mol_type = other RNA
caatttcaaccgtcttttctca

SEQ ID NO: 14371 - RNA, 22 nt, synthetic construct
  misc_feature 1..22: note = HBV-targeting guide sequence portion
  source 1..22: mol_type = other RNA
caattttctagggggaactacc

SEQ ID NO: 14372 - RNA, 22 nt, synthetic construct
  misc_feature 1..22: note = HBV-targeting guide sequence portion
  source 1..22: mol_type = other RNA
caattttcttttgtctttgggt

SEQ ID NO: 14373 - RNA, 22 nt, synthetic construct
  misc_feature 1..22: note = HBV-targeting guide sequence portion
  source 1..22: mol_type = other RNA
cacaaaatcaaagaatgtttca

SEQ ID NO: 14374 - RNA, 22 nt, synthetic construct
  misc_feature 1..22: note = HBV-targeting guide sequence portion
  source 1..22: mol_type = other RNA
cacaaaatcacatcatacacaa

SEQ ID NO: 14375 - RNA, 22 nt, synthetic construct
  misc_feature 1..22: note = HBV-targeting guide sequence portion
  source 1..22: mol_type = other RNA
cacaaccttccaccaaactctg

SEQ ID NO: 14376 - RNA, 22 nt, synthetic construct
  misc_feature 1..22: note = HBV-targeting guide sequence portion
  source 1..22: mol_type = other RNA
cacaagtctccggaagtgttga

SEQ ID NO: 14377 - RNA, 22 nt, synthetic construct
  misc_feature 1..22: note = HBV-targeting guide sequence portion
  source 1..22: mol_type = other RNA
cacaataccgcagagtctagac

SEQ ID NO: 14378 - RNA, 22 nt, synthetic construct
  misc_feature 1..22: note = HBV-targeting guide sequence portion
  source 1..22: mol_type = other RNA
cacaatagttgtctgaacttta

SEQ ID NO: 14379 - RNA, 22 nt, synthetic construct
  misc_feature 1..22: note = HBV-targeting guide sequence portion
  source 1..22: mol_type = other RNA
cacaatgtggttatcctgcttt

SEQ ID NO: 14380 - RNA, 22 nt, synthetic construct
  misc_feature 1..22: note = HBV-targeting guide sequence portion
  source 1..22: mol_type = other RNA
cacaattcgttgacacactttc

SEQ ID NO: 14381 - RNA, 22 nt, synthetic construct
  misc_feature 1..22: note = HBV-targeting guide sequence portion
  source 1..22: mol_type = other RNA
cacacggtagttccccctagaa

SEQ ID NO: 14382 - RNA, 22 nt, synthetic construct
  misc_feature 1..22: note = HBV-targeting guide sequence portion
  source 1..22: mol_type = other RNA
cacacggtccggcagatgagaa

SEQ ID NO: 14383 - RNA, 22 nt, synthetic construct
  misc_feature 1..22: note = HBV-targeting guide sequence portion
  source 1..22: mol_type = other RNA
cacactccaaaagacaccaaat

SEQ ID NO: 14384 - RNA, 22 nt, synthetic construct
  misc_feature 1..22: note = HBV-targeting guide sequence portion
  source 1..22: mol_type = other RNA
cacactctatggaaggcgggtg

SEQ ID NO: 14385 - RNA, 22 nt, synthetic construct
  misc_feature 1..22: note = HBV-targeting guide sequence portion
  source 1..22: mol_type = other RNA
cacactttccaatcaataggcc

SEQ ID NO: 14386 - RNA, 22 nt, synthetic construct
  misc_feature 1..22: note = HBV-targeting guide sequence portion
  source 1..22: mol_type = other RNA
cacagaaaggccttgtaagttg

SEQ ID NO: 14387 - RNA, 22 nt, synthetic construct
  misc_feature 1..22: note = HBV-targeting guide sequence portion
  source 1..22: mol_type = other RNA
cacagaatgaggcgctatgtgt

SEQ ID NO: 14388 - RNA, 22 nt, synthetic construct
  misc_feature 1..22: note = HBV-targeting guide sequence portion
  source 1..22: mol_type = other RNA
cacagacctggccgttgcctgg

SEQ ID NO: 14389 - RNA, 22 nt, synthetic construct
  misc_feature 1..22: note = HBV-targeting guide sequence portion
  source 1..22: mol_type = other RNA
cacagacggggagtccgcgtaa

SEQ ID NO: 14390 - RNA, 22 nt, synthetic construct
  misc_feature 1..22: note = HBV-targeting guide sequence portion
  source 1..22: mol_type = other RNA
cacagcctagcagccatgggaa

SEQ ID NO: 14391 - RNA, 22 nt, synthetic construct
  misc_feature 1..22: note = HBV-targeting guide sequence portion
  source 1..22: mol_type = other RNA
cacagcttggaggcttgaacag

SEQ ID NO: 14392 - RNA, 22 nt, synthetic construct
  misc_feature 1..22: note = HBV-targeting guide sequence portion
  source 1..22: mol_type = other RNA
cacagtagctccaaattcttta

SEQ ID NO: 14393 - RNA, 22 nt, synthetic construct
  misc_feature 1..22: note = HBV-targeting guide sequence portion
  source 1..22: mol_type = other RNA
cacatagcgcctcattctgtgg

SEQ ID NO: 14394 - RNA, 22 nt, synthetic construct
  misc_feature 1..22: note = HBV-targeting guide sequence portion
  source 1..22: mol_type = other RNA
cacatatcgtcaatcttctcga

SEQ ID NO: 14395 - RNA, 22 nt, synthetic construct
  misc_feature 1..22: note = HBV-targeting guide sequence portion
  source 1..22: mol_type = other RNA
cacatcaggattcctaggaccc

SEQ ID NO: 14396 - RNA, 22 nt, synthetic construct
  misc_feature 1..22: note = HBV-targeting guide sequence portion
  source 1..22: mol_type = other RNA
cacatcatacacaaaatcaaag

SEQ ID NO: 14397 - RNA, 22 nt, synthetic construct
  misc_feature 1..22: note = HBV-targeting guide sequence portion
  source 1..22: mol_type = other RNA
cacatcatccatataactgaaa

SEQ ID NO: 14398 - RNA, 22 nt, synthetic construct
  misc_feature 1..22: note = HBV-targeting guide sequence portion
  source 1..22: mol_type = other RNA
cacatccagcgataaccaggac

SEQ ID NO: 14399 - RNA, 22 nt, synthetic construct
  misc_feature 1..22: note = HBV-targeting guide sequence portion
  source 1..22: mol_type = other RNA
cacattgtgtaaaaggggcagc

SEQ ID NO: 14400 - RNA, 22 nt, synthetic construct
  misc_feature 1..22: note = HBV-targeting guide sequence portion
  source 1..22: mol_type = other RNA
cacatttcttgtcttacttttg

SEQ ID NO: 14401 - RNA, 22 nt, synthetic construct
  misc_feature 1..22: note = HBV-targeting guide sequence portion
  source 1..22: mol_type = other RNA
cacattttttgataatatcttg

SEQ ID NO: 14402 - RNA, 22 nt, synthetic construct
  misc_feature 1..22: note = HBV-targeting guide sequence portion
  source 1..22: mol_type = other RNA
caccaaactctgcaagatccca

SEQ ID NO: 14403 - RNA, 22 nt, synthetic construct
  misc_feature 1..22: note = HBV-targeting guide sequence portion
  source 1..22: mol_type = other RNA
caccaaatactctaggaccgtt

SEQ ID NO: 14404 - RNA, 22 nt, synthetic construct
  misc_feature 1..22: note = HBV-targeting guide sequence portion
  source 1..22: mol_type = other RNA
caccaaatacttgcccttggat

SEQ ID NO: 14405 - RNA, 22 nt, synthetic construct
  misc_feature 1..22: note = HBV-targeting guide sequence portion
  source 1..22: mol_type = other RNA
caccaaatgcccctatcctatc

SEQ ID NO: 14406 - RNA, 22 nt, synthetic construct
  misc_feature 1..22: note = HBV-targeting guide sequence portion
  source 1..22: mol_type = other RNA
caccaacctcctgtcctccaac

SEQ ID NO: 14407 - RNA, 22 nt, synthetic construct
  misc_feature 1..22: note = HBV-targeting guide sequence portion
  source 1..22: mol_type = other RNA
caccaagatattatcaaaaaat

SEQ ID NO: 14408 - RNA, 22 nt, synthetic construct
  misc_feature 1..22: note = HBV-targeting guide sequence portion
  source 1..22: mol_type = other RNA
caccaattcttgcccaaggtct

SEQ ID NO: 14409 - RNA, 22 nt, synthetic construct
  misc_feature 1..22: note = HBV-targeting guide sequence portion
  source 1..22: mol_type = other RNA
caccacgagtctagactctgcg

SEQ ID NO: 14410 - RNA, 22 nt, synthetic construct
  misc_feature 1..22: note = HBV-targeting guide sequence portion
  source 1..22: mol_type = other RNA
caccagcaatcctctgggattc

SEQ ID NO: 14411 - RNA, 22 nt, synthetic construct
  misc_feature 1..22: note = HBV-targeting guide sequence portion
  source 1..22: mol_type = other RNA
caccagcaccatgcaacttttt

SEQ ID NO: 14412 - RNA, 22 nt, synthetic construct
  misc_feature 1..22: note = HBV-targeting guide sequence portion
  source 1..22: mol_type = other RNA
caccagcacgggaccctgcaga

SEQ ID NO: 14413 - RNA, 22 nt, synthetic construct
  misc_feature 1..22: note = HBV-targeting guide sequence portion
  source 1..22: mol_type = other RNA
caccagcagggagatacaggcc

SEQ ID NO: 14414 - RNA, 22 nt, synthetic construct
  misc_feature 1..22: note = HBV-targeting guide sequence portion
  source 1..22: mol_type = other RNA
caccagttggacccagccttca

SEQ ID NO: 14415 - RNA, 22 nt, synthetic construct
  misc_feature 1..22: note = HBV-targeting guide sequence portion
  source 1..22: mol_type = other RNA
caccatactgcactcaggcaag

SEQ ID NO: 14416 - RNA, 22 nt, synthetic construct
  misc_feature 1..22: note = HBV-targeting guide sequence portion
  source 1..22: mol_type = other RNA
caccatattcttgggaacaaga

SEQ ID NO: 14417 - RNA, 22 nt, synthetic construct
  misc_feature 1..22: note = HBV-targeting guide sequence portion
  source 1..22: mol_type = other RNA
caccatgcaactttttcacctc

SEQ ID NO: 14418 - RNA, 22 nt, synthetic construct
  misc_feature 1..22: note = HBV-targeting guide sequence portion
  source 1..22: mol_type = other RNA
cacccaaagacaaaagaaaatt

SEQ ID NO: 14419 - RNA, 22 nt, synthetic construct
  misc_feature 1..22: note = HBV-targeting guide sequence portion
  source 1..22: mol_type = other RNA
cacccaaggcacagcttggagg

SEQ ID NO: 14420 - RNA, 22 nt, synthetic construct
  misc_feature 1..22: note = HBV-targeting guide sequence portion
  source 1..22: mol_type = other RNA
cacccaggtagctagagtcatt

SEQ ID NO: 14421 - RNA, 22 nt, synthetic construct
  misc_feature 1..22: note = HBV-targeting guide sequence portion
  source 1..22: mol_type = other RNA
caccccaaaaggcctccgtgcg

SEQ ID NO: 14422 - RNA, 22 nt, synthetic construct
  misc_feature 1..22: note = HBV-targeting guide sequence portion
  source 1..22: mol_type = other RNA
caccccaccgcacggaggcctt

SEQ ID NO: 14423 - RNA, 22 nt, synthetic construct
  misc_feature 1..22: note = HBV-targeting guide sequence portion
  source 1..22: mol_type = other RNA
cacccgccttccatagagtgtg

SEQ ID NO: 14424 - RNA, 22 nt, synthetic construct
  misc_feature 1..22: note = HBV-targeting guide sequence portion
  source 1..22: mol_type = other RNA
caccctcttttcctaatataca

SEQ ID NO: 14425 - RNA, 22 nt, synthetic construct
  misc_feature 1..22: note = HBV-targeting guide sequence portion
  source 1..22: mol_type = other RNA
caccgcacggaggccttttggg

SEQ ID NO: 14426 - RNA, 22 nt, synthetic construct
  misc_feature 1..22: note = HBV-targeting guide sequence portion
  source 1..22: mol_type = other RNA
caccgtgaacgcccaccaattc

SEQ ID NO: 14427 - RNA, 22 nt, synthetic construct
  misc_feature 1..22: note = HBV-targeting guide sequence portion
  source 1..22: mol_type = other RNA
cacctcaccatactgcactcag

SEQ ID NO: 14428 - RNA, 22 nt, synthetic construct
  misc_feature 1..22: note = HBV-targeting guide sequence portion
  source 1..22: mol_type = other RNA
cacctctctttacgcggactcc

SEQ ID NO: 14429 - RNA, 22 nt, synthetic construct
  misc_feature 1..22: note = HBV-targeting guide sequence portion
  source 1..22: mol_type = other RNA
cacctctgagaaacactcatcc

SEQ ID NO: 14430 - RNA, 22 nt, synthetic construct
  misc_feature 1..22: note = HBV-targeting guide sequence portion
  source 1..22: mol_type = other RNA
cacctctgcacgtcgcatggag

SEQ ID NO: 14431 - RNA, 22 nt, synthetic construct
  misc_feature 1..22: note = HBV-targeting guide sequence portion
  source 1..22: mol_type = other RNA
cacctctgcctaatcatctctt

SEQ ID NO: 14432 - RNA, 22 nt, synthetic construct
  misc_feature 1..22: note = HBV-targeting guide sequence portion
  source 1..22: mol_type = other RNA
cacctgtattcccatcccatca

SEQ ID NO: 14433 - RNA, 22 nt, synthetic construct
  misc_feature 1..22: note = HBV-targeting guide sequence portion
  source 1..22: mol_type = other RNA
caccttatgagtccaagggata

SEQ ID NO: 14434 - RNA, 22 nt, synthetic construct
  misc_feature 1..22: note = HBV-targeting guide sequence portion
  source 1..22: mol_type = other RNA
cacgactcctgctcaaggaacc

SEQ ID NO: 14435 - RNA, 22 nt, synthetic construct
  misc_feature 1..22: note = HBV-targeting guide sequence portion
  source 1..22: mol_type = other RNA
cacgagcaggggtcctaggaat

SEQ ID NO: 14436 - RNA, 22 nt, synthetic construct
  misc_feature 1..22: note = HBV-targeting guide sequence portion
  source 1..22: mol_type = other RNA
cacgagtctagactctgcggta

SEQ ID NO: 14437 - RNA, 22 nt, synthetic construct
  misc_feature 1..22: note = HBV-targeting guide sequence portion
  source 1..22: mol_type = other RNA
cacgcatgcgctgatggcctat

SEQ ID NO: 14438 - RNA, 22 nt, synthetic construct
  misc_feature 1..22: note = HBV-targeting guide sequence portion
  source 1..22: mol_type = other RNA
cacggaggccttttggggtgga

SEQ ID NO: 14439 - RNA, 22 nt, synthetic construct
  misc_feature 1..22: note = HBV-targeting guide sequence portion
  source 1..22: mol_type = other RNA
cacgggaccctgcagaacctgc

SEQ ID NO: 14440 - RNA, 22 nt, synthetic construct
  misc_feature 1..22: note = HBV-targeting guide sequence portion
  source 1..22: mol_type = other RNA
cacggggcgcacctctctttac

SEQ ID NO: 14441 - RNA, 22 nt, synthetic construct
  misc_feature 1..22: note = HBV-targeting guide sequence portion
  source 1..22: mol_type = other RNA
cacggtagttccccctagaaaa

SEQ ID NO: 14442 - RNA, 22 nt, synthetic construct
  misc_feature 1..22: note = HBV-targeting guide sequence portion
  source 1..22: mol_type = other RNA
cacggtccggcagatgagaagg

SEQ ID NO: 14443 - RNA, 22 nt, synthetic construct
  misc_feature 1..22: note = HBV-targeting guide sequence portion
  source 1..22: mol_type = other RNA
cacggtggtctccatgcgacgt

SEQ ID NO: 14444 - RNA, 22 nt, synthetic construct
  misc_feature 1..22: note = HBV-targeting guide sequence portion
  source 1..22: mol_type = other RNA
cacgtcgcatggagaccaccgt

SEQ ID NO: 14445 - RNA, 22 nt, synthetic construct
  misc_feature 1..22: note = HBV-targeting guide sequence portion
  source 1..22: mol_type = other RNA
cactagtaaactgagccaagag

SEQ ID NO: 14446 - RNA, 22 nt, synthetic construct
  misc_feature 1..22: note = HBV-targeting guide sequence portion
  source 1..22: mol_type = other RNA
cactatttacacactctatgga

SEQ ID NO: 14447 - RNA, 22 nt, synthetic construct
  misc_feature 1..22: note = HBV-targeting guide sequence portion
  source 1..22: mol_type = other RNA
cactcaccaacctcctgtcctc

SEQ ID NO: 14448 - RNA, 22 nt, synthetic construct
  misc_feature 1..22: note = HBV-targeting guide sequence portion
  source 1..22: mol_type = other RNA
cactcaggcaagcaattctttg

SEQ ID NO: 14449 - RNA, 22 nt, synthetic construct
  misc_feature 1..22: note = HBV-targeting guide sequence portion
  source 1..22: mol_type = other RNA
cactcatatgggcctaaagttc

SEQ ID NO: 14450 - RNA, 22 nt, synthetic construct
  misc_feature 1..22: note = HBV-targeting guide sequence portion
  source 1..22: mol_type = other RNA
cactccaaaagacaccaaatac

SEQ ID NO: 14451 - RNA, 22 nt, synthetic construct
  misc_feature 1..22: note = HBV-targeting guide sequence portion
  source 1..22: mol_type = other RNA
cactcccataggaattttccga

SEQ ID NO: 14452 - RNA, 22 nt, synthetic construct
  misc_feature 1..22: note = HBV-targeting guide sequence portion
  source 1..22: mol_type = other RNA
cactcctccagcttatagacca

SEQ ID NO: 14453 - RNA, 22 nt, synthetic construct
  misc_feature 1..22: note = HBV-targeting guide sequence portion
  source 1..22: mol_type = other RNA
cactctatggaaggcgggtgtt

SEQ ID NO: 14454 - RNA, 22 nt, synthetic construct
  misc_feature 1..22: note = HBV-targeting guide sequence portion
  source 1..22: mol_type = other RNA
cactctcttatataaaacaccc

SEQ ID NO: 14455 - RNA, 22 nt, synthetic construct
  misc_feature 1..22: note = HBV-targeting guide sequence portion
  source 1..22: mol_type = other RNA
cactctgggatcttgcagagtt

SEQ ID NO: 14456 - RNA, 22 nt, synthetic construct
  misc_feature 1..22: note = HBV-targeting guide sequence portion
  source 1..22: mol_type = other RNA
cactgaacaaatggcactagta

SEQ ID NO: 14457 - RNA, 22 nt, synthetic construct
  misc_feature 1..22: note = HBV-targeting guide sequence portion
  source 1..22: mol_type = other RNA
cactgcatggcctgaggatgag

SEQ ID NO: 14458 - RNA, 22 nt, synthetic construct
  misc_feature 1..22: note = HBV-targeting guide sequence portion
  source 1..22: mol_type = other RNA
cactggttggggcttggtcata

SEQ ID NO: 14459 - RNA, 22 nt, synthetic construct
  misc_feature 1..22: note = HBV-targeting guide sequence portion
  source 1..22: mol_type = other RNA
cactgtttggctttcagttata

SEQ ID NO: 14460 - RNA, 22 nt, synthetic construct
  misc_feature 1..22: note = HBV-targeting guide sequence portion
  source 1..22: mol_type = other RNA
cacttccggagacttgtgttgt

SEQ ID NO: 14461 - RNA, 22 nt, synthetic construct
  misc_feature 1..22: note = HBV-targeting guide sequence portion
  source 1..22: mol_type = other RNA
cacttcgcttcacctctgcacg

SEQ ID NO: 14462 - RNA, 22 nt, synthetic construct
  misc_feature 1..22: note = HBV-targeting guide sequence portion
  source 1..22: mol_type = other RNA
cacttggcacagacctggccgt

SEQ ID NO: 14463 - RNA, 22 nt, synthetic construct
  misc_feature 1..22: note = HBV-targeting guide sequence portion
  source 1..22: mol_type = other RNA
cactttccaatcaataggcctg

SEQ ID NO: 14464 - RNA, 22 nt, synthetic construct
  misc_feature 1..22: note = HBV-targeting guide sequence portion
  source 1..22: mol_type = other RNA
cactttttcgccaacttacaag

SEQ ID NO: 14465 - RNA, 22 nt, synthetic construct
  misc_feature 1..22: note = HBV-targeting guide sequence portion
  source 1..22: mol_type = other RNA
cagaaaactcccggttaacagg

SEQ ID NO: 14466 - RNA, 22 nt, synthetic construct
  misc_feature 1..22: note = HBV-targeting guide sequence portion
  source 1..22: mol_type = other RNA
cagaaaggccttgtaagttggc

SEQ ID NO: 14467 - RNA, 22 nt, synthetic construct
  misc_feature 1..22: note = HBV-targeting guide sequence portion
  source 1..22: mol_type = other RNA
cagaacatctagttaatcatta

SEQ ID NO: 14468 - RNA, 22 nt, synthetic construct
  misc_feature 1..22: note = HBV-targeting guide sequence portion
  source 1..22: mol_type = other RNA
cagaacctgcacgactcctgct

SEQ ID NO: 14469 - RNA, 22 nt, synthetic construct
  misc_feature 1..22: note = HBV-targeting guide sequence portion
  source 1..22: mol_type = other RNA
cagaagaaccaacaagaagatg

SEQ ID NO: 14470 - RNA, 22 nt, synthetic construct
  misc_feature 1..22: note = HBV-targeting guide sequence portion
  source 1..22: mol_type = other RNA
cagaagacccacaattcgttga

SEQ ID NO: 14471 - RNA, 22 nt, synthetic construct
  misc_feature 1..22: note = HBV-targeting guide sequence portion
  source 1..22: mol_type = other RNA
cagaagatctcaatctcgggga

SEQ ID NO: 14472 - RNA, 22 nt, synthetic construct
  misc_feature 1..22: note = HBV-targeting guide sequence portion
  source 1..22: mol_type = other RNA
cagaaggcaaaaacgagagtaa

SEQ ID NO: 14473 - RNA, 22 nt, synthetic construct
  misc_feature 1..22: note = HBV-targeting guide sequence portion
  source 1..22: mol_type = other RNA
cagaatctttccaccagcaatc

SEQ ID NO: 14474 - RNA, 22 nt, synthetic construct
  misc_feature 1..22: note = HBV-targeting guide sequence portion
  source 1..22: mol_type = other RNA
cagaatgaggcgctatgtgttg

SEQ ID NO: 14475 - RNA, 22 nt, synthetic construct
  misc_feature 1..22: note = HBV-targeting guide sequence portion
  source 1..22: mol_type = other RNA
cagacaactattgtggtttcac

SEQ ID NO: 14476 - RNA, 22 nt, synthetic construct
  misc_feature 1..22: note = HBV-targeting guide sequence portion
  source 1..22: mol_type = other RNA
cagacacatccagcgataacca

SEQ ID NO: 14477 - RNA, 22 nt, synthetic construct
  misc_feature 1..22: note = HBV-targeting guide sequence portion
  source 1..22: mol_type = other RNA
cagaccaatttatgcctacagc

SEQ ID NO: 14478 - RNA, 22 nt, synthetic construct
  misc_feature 1..22: note = HBV-targeting guide sequence portion
  source 1..22: mol_type = other RNA
cagaccggctgcgagcaaaaca

SEQ ID NO: 14479 - RNA, 22 nt, synthetic construct
  misc_feature 1..22: note = HBV-targeting guide sequence portion
  source 1..22: mol_type = other RNA
cagacctggccgttgcctggca

SEQ ID NO: 14480 - RNA, 22 nt, synthetic construct
  misc_feature 1..22: note = HBV-targeting guide sequence portion
  source 1..22: mol_type = other RNA
cagacgaagatctcaatcgccg

SEQ ID NO: 14481 - RNA, 22 nt, synthetic construct
  misc_feature 1..22: note = HBV-targeting guide sequence portion
  source 1..22: mol_type = other RNA
cagacgccaacaaggtaggagc

SEQ ID NO: 14482 - RNA, 22 nt, synthetic construct
  misc_feature 1..22: note = HBV-targeting guide sequence portion
  source 1..22: mol_type = other RNA
cagacgggaaacataccttgat

SEQ ID NO: 14483 - RNA, 22 nt, synthetic construct
  misc_feature 1..22: note = HBV-targeting guide sequence portion
  source 1..22: mol_type = other RNA
cagacggggagtccgcgtaaag

SEQ ID NO: 14484 - RNA, 22 nt, synthetic construct
  misc_feature 1..22: note = HBV-targeting guide sequence portion
  source 1..22: mol_type = other RNA
cagacttggcccccaataccac

SEQ ID NO: 14485 - RNA, 22 nt, synthetic construct
  misc_feature 1..22: note = HBV-targeting guide sequence portion
  source 1..22: mol_type = other RNA
cagagaagaggacgacagggcc

SEQ ID NO: 14486 - RNA, 22 nt, synthetic construct
  misc_feature 1..22: note = HBV-targeting guide sequence portion
  source 1..22: mol_type = other RNA
cagagagtccaagagtcctctt

SEQ ID NO: 14487 - RNA, 22 nt, synthetic construct
  misc_feature 1..22: note = HBV-targeting guide sequence portion
  source 1..22: mol_type = other RNA
cagagcaaactccaacaatcca

SEQ ID NO: 14488 - RNA, 22 nt, synthetic construct
  misc_feature 1..22: note = HBV-targeting guide sequence portion
  source 1..22: mol_type = other RNA
cagagctgcggcggtatctaga

SEQ ID NO: 14489 - RNA, 22 nt, synthetic construct
  misc_feature 1..22: note = HBV-targeting guide sequence portion
  source 1..22: mol_type = other RNA
cagaggagccggaaaggttcca

SEQ ID NO: 14490 - RNA, 22 nt, synthetic construct
  misc_feature 1..22: note = HBV-targeting guide sequence portion
  source 1..22: mol_type = other RNA
cagaggattgctggtggaaaga

SEQ ID NO: 14491 - RNA, 22 nt, synthetic construct
  misc_feature 1..22: note = HBV-targeting guide sequence portion
  source 1..22: mol_type = other RNA
cagaggtgaaaaagttgcatgg

SEQ ID NO: 14492 - RNA, 22 nt, synthetic construct
  misc_feature 1..22: note = HBV-targeting guide sequence portion
  source 1..22: mol_type = other RNA
cagaggtgaagcgaagtgcaca

SEQ ID NO: 14493 - RNA, 22 nt, synthetic construct
  misc_feature 1..22: note = HBV-targeting guide sequence portion
  source 1..22: mol_type = other RNA
cagaggtggagacagcggggta

SEQ ID NO: 14494 - RNA, 22 nt, synthetic construct
  misc_feature 1..22: note = HBV-targeting guide sequence portion
  source 1..22: mol_type = other RNA
cagagtctagactcgtggtgga

SEQ ID NO: 14495 - RNA, 22 nt, synthetic construct
  misc_feature 1..22: note = HBV-targeting guide sequence portion
  source 1..22: mol_type = other RNA
cagagtgagaggcctgtatctc

SEQ ID NO: 14496 - RNA, 22 nt, synthetic construct
  misc_feature 1..22: note = HBV-targeting guide sequence portion
  source 1..22: mol_type = other RNA
cagagttgtcagtcccgagaat

SEQ ID NO: 14497 - RNA, 22 nt, synthetic construct
  misc_feature 1..22: note = HBV-targeting guide sequence portion
  source 1..22: mol_type = other RNA
cagatgagaaggcacagacggg

SEQ ID NO: 14498 - RNA, 22 nt, synthetic construct
  misc_feature 1..22: note = HBV-targeting guide sequence portion
  source 1..22: mol_type = other RNA
cagattgggacttcaatcccaa

SEQ ID NO: 14499 - RNA, 22 nt, synthetic construct
  misc_feature 1..22: note = HBV-targeting guide sequence portion
  source 1..22: mol_type = other RNA
cagcaaaacccagaagacccac

SEQ ID NO: 14500 - RNA, 22 nt, synthetic construct
  misc_feature 1..22: note = HBV-targeting guide sequence portion
  source 1..22: mol_type = other RNA
cagcaaacacttggcacagacc

SEQ ID NO: 14501 - RNA, 22 nt, synthetic construct
  misc_feature 1..22: note = HBV-targeting guide sequence portion
  source 1..22: mol_type = other RNA
cagcaaagaattgcttgcctga

SEQ ID NO: 14502 - RNA, 22 nt, synthetic construct
  misc_feature 1..22: note = HBV-targeting guide sequence portion
  source 1..22: mol_type = other RNA
cagcaaatccgcctcctgcctc

SEQ ID NO: 14503 - RNA, 22 nt, synthetic construct
  misc_feature 1..22: note = HBV-targeting guide sequence portion
  source 1..22: mol_type = other RNA
cagcaacaggagggatacatag

SEQ ID NO: 14504 - RNA, 22 nt, synthetic construct
  misc_feature 1..22: note = HBV-targeting guide sequence portion
  source 1..22: mol_type = other RNA
cagcaatcctctgggattcttt

SEQ ID NO: 14505 - RNA, 22 nt, synthetic construct
  misc_feature 1..22: note = HBV-targeting guide sequence portion
  source 1..22: mol_type = other RNA
cagcacagcctagcagccatgg

SEQ ID NO: 14506 - RNA, 22 nt, synthetic construct
  misc_feature 1..22: note = HBV-targeting guide sequence portion
  source 1..22: mol_type = other RNA
cagcaccatgcaactttttcac

SEQ ID NO: 14507 - RNA, 22 nt, synthetic construct
  misc_feature 1..22: note = HBV-targeting guide sequence portion
  source 1..22: mol_type = other RNA
cagcacgggaccctgcagaacc

SEQ ID NO: 14508 - RNA, 22 nt, synthetic construct
  misc_feature 1..22: note = HBV-targeting guide sequence portion
  source 1..22: mol_type = other RNA
cagcaggatgaagaggaagatg

SEQ ID NO: 14509 - RNA, 22 nt, synthetic construct
  misc_feature 1..22: note = HBV-targeting guide sequence portion
  source 1..22: mol_type = other RNA
cagcagggagatacaggcctct

SEQ ID NO: 14510 - RNA, 22 nt, synthetic construct
  misc_feature 1..22: note = HBV-targeting guide sequence portion
  source 1..22: mol_type = other RNA
cagcatcttgagtccctttata

SEQ ID NO: 14511 - RNA, 22 nt, synthetic construct
  misc_feature 1..22: note = HBV-targeting guide sequence portion
  source 1..22: mol_type = other RNA
cagcatggggcagaatctttcc

SEQ ID NO: 14512 - RNA, 22 nt, synthetic construct
  misc_feature 1..22: note = HBV-targeting guide sequence portion
  source 1..22: mol_type = other RNA
cagccatgggaacgatgtatat

SEQ ID NO: 14513 - RNA, 22 nt, synthetic construct
  misc_feature 1..22: note = HBV-targeting guide sequence portion
  source 1..22: mol_type = other RNA
cagcccgtttctcttggctcag

SEQ ID NO: 14514 - RNA, 22 nt, synthetic construct
  misc_feature 1..22: note = HBV-targeting guide sequence portion
  source 1..22: mol_type = other RNA
cagccggtctggagcaaacatt

SEQ ID NO: 14515 - RNA, 22 nt, synthetic construct
  misc_feature 1..22: note = HBV-targeting guide sequence portion
  source 1..22: mol_type = other RNA
cagcctaccccgctgtctccac

SEQ ID NO: 14516 - RNA, 22 nt, synthetic construct
  misc_feature 1..22: note = HBV-targeting guide sequence portion
  source 1..22: mol_type = other RNA
cagcctagcagccatgggaacg

SEQ ID NO: 14517 - RNA, 22 nt, synthetic construct
  misc_feature 1..22: note = HBV-targeting guide sequence portion
  source 1..22: mol_type = other RNA
cagcctcctagtacaaagatca

SEQ ID NO: 14518 - RNA, 22 nt, synthetic construct
  misc_feature 1..22: note = HBV-targeting guide sequence portion
  source 1..22: mol_type = other RNA
cagccttcagagcaaactccaa

SEQ ID NO: 14519 - RNA, 22 nt, synthetic construct
  misc_feature 1..22: note = HBV-targeting guide sequence portion
  source 1..22: mol_type = other RNA
cagcgataaccaggacaagttg

SEQ ID NO: 14520 - RNA, 22 nt, synthetic construct
  misc_feature 1..22: note = HBV-targeting guide sequence portion
  source 1..22: mol_type = other RNA
cagcgcagggtccccaatcctc

SEQ ID NO: 14521 - RNA, 22 nt, synthetic construct
  misc_feature 1..22: note = HBV-targeting guide sequence portion
  source 1..22: mol_type = other RNA
cagcgcatgcgtggaacctttc

SEQ ID NO: 14522 - RNA, 22 nt, synthetic construct
  misc_feature 1..22: note = HBV-targeting guide sequence portion
  source 1..22: mol_type = other RNA
cagcgccgacgggacgtaaaca

SEQ ID NO: 14523 - RNA, 22 nt, synthetic construct
  misc_feature 1..22: note = HBV-targeting guide sequence portion
  source 1..22: mol_type = other RNA
cagcggggtaggctgccgtcct

SEQ ID NO: 14524 - RNA, 22 nt, synthetic construct
  misc_feature 1..22: note = HBV-targeting guide sequence portion
  source 1..22: mol_type = other RNA
cagcggtataaagggactcaag

SEQ ID NO: 14525 - RNA, 22 nt, synthetic construct
  misc_feature 1..22: note = HBV-targeting guide sequence portion
  source 1..22: mol_type = other RNA
cagctcctaccttgttggcgtc

SEQ ID NO: 14526 - RNA, 22 nt, synthetic construct
  misc_feature 1..22: note = HBV-targeting guide sequence portion
  source 1..22: mol_type = other RNA
cagctctgtatcgggatgcctt

SEQ ID NO: 14527 - RNA, 22 nt, synthetic construct
  misc_feature 1..22: note = HBV-targeting guide sequence portion
  source 1..22: mol_type = other RNA
cagcttatagaccaccaaatgc

SEQ ID NO: 14528 - RNA, 22 nt, synthetic construct
  misc_feature 1..22: note = HBV-targeting guide sequence portion
  source 1..22: mol_type = other RNA
cagcttggaggcttgaacagta

SEQ ID NO: 14529 - RNA, 22 nt, synthetic construct
  misc_feature 1..22: note = HBV-targeting guide sequence portion
  source 1..22: mol_type = other RNA
caggaacagtaaaccctgttcc

SEQ ID NO: 14530 - RNA, 22 nt, synthetic construct
  misc_feature 1..22: note = HBV-targeting guide sequence portion
  source 1..22: mol_type = other RNA
caggacaagttggaggacagga

SEQ ID NO: 14531 - RNA, 22 nt, synthetic construct
  misc_feature 1..22: note = HBV-targeting guide sequence portion
  source 1..22: mol_type = other RNA
caggacggcagcctaccccgct

SEQ ID NO: 14532 - RNA, 22 nt, synthetic construct
  misc_feature 1..22: note = HBV-targeting guide sequence portion
  source 1..22: mol_type = other RNA
caggagactccaaggcatcccg

SEQ ID NO: 14533 - RNA, 22 nt, synthetic construct
  misc_feature 1..22: note = HBV-targeting guide sequence portion
  source 1..22: mol_type = other RNA
caggaggcggatttgctggcaa

SEQ ID NO: 14534 - RNA, 22 nt, synthetic construct
  misc_feature 1..22: note = HBV-targeting guide sequence portion
  source 1..22: mol_type = other RNA
caggagggatacatagaggttc

SEQ ID NO: 14535 - RNA, 22 nt, synthetic construct
  misc_feature 1..22: note = HBV-targeting guide sequence portion
  source 1..22: mol_type = other RNA
caggaggttggtgagtgattgg

SEQ ID NO: 14536 - RNA, 22 nt, synthetic construct
  misc_feature 1..22: note = HBV-targeting guide sequence portion
  source 1..22: mol_type = other RNA
caggagtcgtgcaggttctgca

SEQ ID NO: 14537 - RNA, 22 nt, synthetic construct
  misc_feature 1..22: note = HBV-targeting guide sequence portion
  source 1..22: mol_type = other RNA
caggataaccacattgtgtaaa

SEQ ID NO: 14538 - RNA, 22 nt, synthetic construct
  misc_feature 1..22: note = HBV-targeting guide sequence portion
  source 1..22: mol_type = other RNA
caggatcatcaaccaccagcac

SEQ ID NO: 14539 - RNA, 22 nt, synthetic construct
  misc_feature 1..22: note = HBV-targeting guide sequence portion
  source 1..22: mol_type = other RNA
caggatccagttggcagcacag

SEQ ID NO: 14540 - RNA, 22 nt, synthetic construct
  misc_feature 1..22: note = HBV-targeting guide sequence portion
  source 1..22: mol_type = other RNA
caggatgaagaggaagatgata

SEQ ID NO: 14541 - RNA, 22 nt, synthetic construct
  misc_feature 1..22: note = HBV-targeting guide sequence portion
  source 1..22: mol_type = other RNA
caggatgatgggatgggaatac

SEQ ID NO: 14542 - RNA, 22 nt, synthetic construct
  misc_feature 1..22: note = HBV-targeting guide sequence portion
  source 1..22: mol_type = other RNA
caggattcctaggacccctgct

SEQ ID NO: 14543 - RNA, 22 nt, synthetic construct
  misc_feature 1..22: note = HBV-targeting guide sequence portion
  source 1..22: mol_type = other RNA
caggcaacggccaggtctgtgc

SEQ ID NO: 14544 - RNA, 22 nt, synthetic construct
  misc_feature 1..22: note = HBV-targeting guide sequence portion
  source 1..22: mol_type = other RNA
caggcaagcaattctttgctgg

SEQ ID NO: 14545 - RNA, 22 nt, synthetic construct
  misc_feature 1..22: note = HBV-targeting guide sequence portion
  source 1..22: mol_type = other RNA
caggcagagaagaggacgacag

SEQ ID NO: 14546 - RNA, 22 nt, synthetic construct
  misc_feature 1..22: note = HBV-targeting guide sequence portion
  source 1..22: mol_type = other RNA
caggcataatcaatttcaaccg

SEQ ID NO: 14547 - RNA, 22 nt, synthetic construct
  misc_feature 1..22: note = HBV-targeting guide sequence portion
  source 1..22: mol_type = other RNA
caggcctattgattggaaagtg

SEQ ID NO: 14548 - RNA, 22 nt, synthetic construct
  misc_feature 1..22: note = HBV-targeting guide sequence portion
  source 1..22: mol_type = other RNA
caggcctctcactctgggatct

SEQ ID NO: 14549 - RNA, 22 nt, synthetic construct
  misc_feature 1..22: note = HBV-targeting guide sequence portion
  source 1..22: mol_type = other RNA
caggcggggttttccttgttga

SEQ ID NO: 14550 - RNA, 22 nt, synthetic construct
  misc_feature 1..22: note = HBV-targeting guide sequence portion
  source 1..22: mol_type = other RNA
caggctcagggcataatgcaaa

SEQ ID NO: 14551 - RNA, 22 nt, synthetic construct
  misc_feature 1..22: note = HBV-targeting guide sequence portion
  source 1..22: mol_type = other RNA
caggctttcactttttcgccaa

SEQ ID NO: 14552 - RNA, 22 nt, synthetic construct
  misc_feature 1..22: note = HBV-targeting guide sequence portion
  source 1..22: mol_type = other RNA
cagggagatacaggcctctcac

SEQ ID NO: 14553 - RNA, 22 nt, synthetic construct
  misc_feature 1..22: note = HBV-targeting guide sequence portion
  source 1..22: mol_type = other RNA
cagggatccttgttgggattga

SEQ ID NO: 14554 - RNA, 22 nt, synthetic construct
  misc_feature 1..22: note = HBV-targeting guide sequence portion
  source 1..22: mol_type = other RNA
cagggcataatgcaaaccttgc

SEQ ID NO: 14555 - RNA, 22 nt, synthetic construct
  misc_feature 1..22: note = HBV-targeting guide sequence portion
  source 1..22: mol_type = other RNA
cagggccccaagcggcctcgag

SEQ ID NO: 14556 - RNA, 22 nt, synthetic construct
  misc_feature 1..22: note = HBV-targeting guide sequence portion
  source 1..22: mol_type = other RNA
caggggtcctaggaatcctgat

SEQ ID NO: 14557 - RNA, 22 nt, synthetic construct
  misc_feature 1..22: note = HBV-targeting guide sequence portion
  source 1..22: mol_type = other RNA
cagggtccccaatcctcgagaa

SEQ ID NO: 14558 - RNA, 22 nt, synthetic construct
  misc_feature 1..22: note = HBV-targeting guide sequence portion
  source 1..22: mol_type = other RNA
cagggtcccgtgctggtggttg

SEQ ID NO: 14559 - RNA, 22 nt, synthetic construct
  misc_feature 1..22: note = HBV-targeting guide sequence portion
  source 1..22: mol_type = other RNA
cagggtttactgttcctgaact

SEQ ID NO: 14560 - RNA, 22 nt, synthetic construct
  misc_feature 1..22: note = HBV-targeting guide sequence portion
  source 1..22: mol_type = other RNA
caggtacagtagaagaataaag

SEQ ID NO: 14561 - RNA, 22 nt, synthetic construct
  misc_feature 1..22: note = HBV-targeting guide sequence portion
  source 1..22: mol_type = other RNA
caggtagctagagtcattagtt

SEQ ID NO: 14562 - RNA, 22 nt, synthetic construct
  misc_feature 1..22: note = HBV-targeting guide sequence portion
  source 1..22: mol_type = other RNA
caggtattgtttacacagaaag

SEQ ID NO: 14563 - RNA, 22 nt, synthetic construct
  misc_feature 1..22: note = HBV-targeting guide sequence portion
  source 1..22: mol_type = other RNA
caggtcccctagaagaagaact

SEQ ID NO: 14564 - RNA, 22 nt, synthetic construct
  misc_feature 1..22: note = HBV-targeting guide sequence portion
  source 1..22: mol_type = other RNA
caggtctgtgccaagtgtttgc

SEQ ID NO: 14565 - RNA, 22 nt, synthetic construct
  misc_feature 1..22: note = HBV-targeting guide sequence portion
  source 1..22: mol_type = other RNA
caggtgcagtttccatccgaag

SEQ ID NO: 14566 - RNA, 22 nt, synthetic construct
  misc_feature 1..22: note = HBV-targeting guide sequence portion
  source 1..22: mol_type = other RNA
caggttctgcagggtcccgtgc

SEQ ID NO: 14567 - RNA, 22 nt, synthetic construct
  misc_feature 1..22: note = HBV-targeting guide sequence portion
  source 1..22: mol_type = other RNA
cagtaaaccctgttccgactac

SEQ ID NO: 14568 - RNA, 22 nt, synthetic construct
  misc_feature 1..22: note = HBV-targeting guide sequence portion
  source 1..22: mol_type = other RNA
cagtagaagaataaagccccgt

SEQ ID NO: 14569 - RNA, 22 nt, synthetic construct
  misc_feature 1..22: note = HBV-targeting guide sequence portion
  source 1..22: mol_type = other RNA
cagtagctccaaattctttata

SEQ ID NO: 14570 - RNA, 22 nt, synthetic construct
  misc_feature 1..22: note = HBV-targeting guide sequence portion
  source 1..22: mol_type = other RNA
cagtaggacatgaacaagagat

SEQ ID NO: 14571 - RNA, 22 nt, synthetic construct
  misc_feature 1..22: note = HBV-targeting guide sequence portion
  source 1..22: mol_type = other RNA
cagtagtcggaacagggtttac

SEQ ID NO: 14572 - RNA, 22 nt, synthetic construct
  misc_feature 1..22: note = HBV-targeting guide sequence portion
  source 1..22: mol_type = other RNA
cagtatggatcggcagaggagc

SEQ ID NO: 14573 - RNA, 22 nt, synthetic construct
  misc_feature 1..22: note = HBV-targeting guide sequence portion
  source 1..22: mol_type = other RNA
cagtatggtgaggtgaacaatg

SEQ ID NO: 14574 - RNA, 22 nt, synthetic construct
  misc_feature 1..22: note = HBV-targeting guide sequence portion
  source 1..22: mol_type = other RNA
cagtcaggacggcagcctaccc

SEQ ID NO: 14575 - RNA, 22 nt, synthetic construct
  misc_feature 1..22: note = HBV-targeting guide sequence portion
  source 1..22: mol_type = other RNA
cagtccccaacctccaatcact

SEQ ID NO: 14576 - RNA, 22 nt, synthetic construct
  misc_feature 1..22: note = HBV-targeting guide sequence portion
  source 1..22: mol_type = other RNA
cagtcccgagaatgtttgctcc

SEQ ID NO: 14577 - RNA, 22 nt, synthetic construct
  misc_feature 1..22: note = HBV-targeting guide sequence portion
  source 1..22: mol_type = other RNA
cagtctttaaacaaacagtctt

SEQ ID NO: 14578 - RNA, 22 nt, synthetic construct
  misc_feature 1..22: note = HBV-targeting guide sequence portion
  source 1..22: mol_type = other RNA
cagtctttgaagtatgcctcaa

SEQ ID NO: 14579 - RNA, 22 nt, synthetic construct
  misc_feature 1..22: note = HBV-targeting guide sequence portion
  source 1..22: mol_type = other RNA
cagtgggggaaagccctacgaa

SEQ ID NO: 14580 - RNA, 22 nt, synthetic construct
  misc_feature 1..22: note = HBV-targeting guide sequence portion
  source 1..22: mol_type = other RNA
cagtgggggttgcatcagcaaa

SEQ ID NO: 14581 - RNA, 22 nt, synthetic construct
  misc_feature 1..22: note = HBV-targeting guide sequence portion
  source 1..22: mol_type = other RNA
cagtggttcgtagggctttccc

SEQ ID NO: 14582 - RNA, 22 nt, synthetic construct
  misc_feature 1..22: note = HBV-targeting guide sequence portion
  source 1..22: mol_type = other RNA
cagttaatgagaaaagacggtt

SEQ ID NO: 14583 - RNA, 22 nt, synthetic construct
  misc_feature 1..22: note = HBV-targeting guide sequence portion
  source 1..22: mol_type = other RNA
cagttatatggatgatgtggta

SEQ ID NO: 14584 - RNA, 22 nt, synthetic construct
  misc_feature 1..22: note = HBV-targeting guide sequence portion
  source 1..22: mol_type = other RNA
cagttatgtcaacactcatatg

SEQ ID NO: 14585 - RNA, 22 nt, synthetic construct
  misc_feature 1..22: note = HBV-targeting guide sequence portion
  source 1..22: mol_type = other RNA
cagttcaggaacagtaaaccct

SEQ ID NO: 14586 - RNA, 22 nt, synthetic construct
  misc_feature 1..22: note = HBV-targeting guide sequence portion
  source 1..22: mol_type = other RNA
cagttggacccagccttcagag

SEQ ID NO: 14587 - RNA, 22 nt, synthetic construct
  misc_feature 1..22: note = HBV-targeting guide sequence portion
  source 1..22: mol_type = other RNA
cagttggcagcacagcctagca

SEQ ID NO: 14588 - RNA, 22 nt, synthetic construct
  misc_feature 1..22: note = HBV-targeting guide sequence portion
  source 1..22: mol_type = other RNA
cagtttactagtgccatttgtt

SEQ ID NO: 14589 - RNA, 22 nt, synthetic construct
  misc_feature 1..22: note = HBV-targeting guide sequence portion
  source 1..22: mol_type = other RNA
cagtttccatccgaaggttttg

SEQ ID NO: 14590 - RNA, 22 nt, synthetic construct
  misc_feature 1..22: note = HBV-targeting guide sequence portion
  source 1..22: mol_type = other RNA
cagtttgtaggcccgcttacag

SEQ ID NO: 14591 - RNA, 22 nt, synthetic construct
  misc_feature 1..22: note = HBV-targeting guide sequence portion
  source 1..22: mol_type = other RNA
cataaattggtctgcgcaccag

SEQ ID NO: 14592 - RNA, 22 nt, synthetic construct
  misc_feature 1..22: note = HBV-targeting guide sequence portion
  source 1..22: mol_type = other RNA
cataactgactactaggtccct

SEQ ID NO: 14593 - RNA, 22 nt, synthetic construct
  misc_feature 1..22: note = HBV-targeting guide sequence portion
  source 1..22: mol_type = other RNA
cataagaggactcttggactct

SEQ ID NO: 14594 - RNA, 22 nt, synthetic construct
  misc_feature 1..22: note = HBV-targeting guide sequence portion
  source 1..22: mol_type = other RNA
cataaggtgggaaattttacgg

SEQ ID NO: 14595 - RNA, 22 nt, synthetic construct
  misc_feature 1..22: note = HBV-targeting guide sequence portion
  source 1..22: mol_type = other RNA
cataatcaatttcaaccgtctt

SEQ ID NO: 14596 - RNA, 22 nt, synthetic construct
  misc_feature 1..22: note = HBV-targeting guide sequence portion
  source 1..22: mol_type = other RNA
cataatgcaaaccttgccagca

SEQ ID NO: 14597 - RNA, 22 nt, synthetic construct
  misc_feature 1..22: note = HBV-targeting guide sequence portion
  source 1..22: mol_type = other RNA
catacaagggcattaaagcagg

SEQ ID NO: 14598 - RNA, 22 nt, synthetic construct
  misc_feature 1..22: note = HBV-targeting guide sequence portion
  source 1..22: mol_type = other RNA
catacacaaaatcaaagaatgt

SEQ ID NO: 14599 - RNA, 22 nt, synthetic construct
  misc_feature 1..22: note = HBV-targeting guide sequence portion
  source 1..22: mol_type = other RNA
cataccttgatagtccagaaga

SEQ ID NO: 14600 - RNA, 22 nt, synthetic construct
  misc_feature 1..22: note = HBV-targeting guide sequence portion
  source 1..22: mol_type = other RNA
catactgcactcaggcaagcaa

SEQ ID NO: 14601 - RNA, 22 nt, synthetic construct
  misc_feature 1..22: note = HBV-targeting guide sequence portion
  source 1..22: mol_type = other RNA
catactgcggaactcctagccg

SEQ ID NO: 14602 - RNA, 22 nt, synthetic construct
  misc_feature 1..22: note = HBV-targeting guide sequence portion
  source 1..22: mol_type = other RNA
catacttcaaagactgtttgtt

SEQ ID NO: 14603 - RNA, 22 nt, synthetic construct
  misc_feature 1..22: note = HBV-targeting guide sequence portion
  source 1..22: mol_type = other RNA
catagaggttccttgagcagga

SEQ ID NO: 14604 - RNA, 22 nt, synthetic construct
  misc_feature 1..22: note = HBV-targeting guide sequence portion
  source 1..22: mol_type = other RNA
catagagtgtgtaaatagtgtc

SEQ ID NO: 14605 - RNA, 22 nt, synthetic construct
  misc_feature 1..22: note = HBV-targeting guide sequence portion
  source 1..22: mol_type = other RNA
catagcagcaggatgaagagga

SEQ ID NO: 14606 - RNA, 22 nt, synthetic construct
  misc_feature 1..22: note = HBV-targeting guide sequence portion
  source 1..22: mol_type = other RNA
catagcccatgaaattaagaga

SEQ ID NO: 14607 - RNA, 22 nt, synthetic construct
  misc_feature 1..22: note = HBV-targeting guide sequence portion
  source 1..22: mol_type = other RNA
catagcgcctcattctgtgggt

SEQ ID NO: 14608 - RNA, 22 nt, synthetic construct
  misc_feature 1..22: note = HBV-targeting guide sequence portion
  source 1..22: mol_type = other RNA
cataggaattttccgaaagccc

SEQ ID NO: 14609 - RNA, 22 nt, synthetic construct
  misc_feature 1..22: note = HBV-targeting guide sequence portion
  source 1..22: mol_type = other RNA
cataggccatcagcgcatgcgt

SEQ ID NO: 14610 - RNA, 22 nt, synthetic construct
  misc_feature 1..22: note = HBV-targeting guide sequence portion
  source 1..22: mol_type = other RNA
catataaagaatttggagctac

SEQ ID NO: 14611 - RNA, 22 nt, synthetic construct
  misc_feature 1..22: note = HBV-targeting guide sequence portion
  source 1..22: mol_type = other RNA
catataactgaaagccaaacag

SEQ ID NO: 14612 - RNA, 22 nt, synthetic construct
  misc_feature 1..22: note = HBV-targeting guide sequence portion
  source 1..22: mol_type = other RNA
catatcgtcaatcttctcgagg

SEQ ID NO: 14613 - RNA, 22 nt, synthetic construct
  misc_feature 1..22: note = HBV-targeting guide sequence portion
  source 1..22: mol_type = other RNA
catatgagtgttgacataactg

SEQ ID NO: 14614 - RNA, 22 nt, synthetic construct
  misc_feature 1..22: note = HBV-targeting guide sequence portion
  source 1..22: mol_type = other RNA
catatgggcctaaagttcagac

SEQ ID NO: 14615 - RNA, 22 nt, synthetic construct
  misc_feature 1..22: note = HBV-targeting guide sequence portion
  source 1..22: mol_type = other RNA
catattcttgggaacaagagct

SEQ ID NO: 14616 - RNA, 22 nt, synthetic construct
  misc_feature 1..22: note = HBV-targeting guide sequence portion
  source 1..22: mol_type = other RNA
catcaaccaccagcacgggacc

SEQ ID NO: 14617 - RNA, 22 nt, synthetic construct
  misc_feature 1..22: note = HBV-targeting guide sequence portion
  source 1..22: mol_type = other RNA
catcacatcaggattcctagga

SEQ ID NO: 14618 - RNA, 22 nt, synthetic construct
  misc_feature 1..22: note = HBV-targeting guide sequence portion
  source 1..22: mol_type = other RNA
catcagcaaacacttggcacag

SEQ ID NO: 14619 - RNA, 22 nt, synthetic construct
  misc_feature 1..22: note = HBV-targeting guide sequence portion
  source 1..22: mol_type = other RNA
catcagcgcatgcgtggaacct

SEQ ID NO: 14620 - RNA, 22 nt, synthetic construct
  misc_feature 1..22: note = HBV-targeting guide sequence portion
  source 1..22: mol_type = other RNA
catcaggattcctaggacccct

SEQ ID NO: 14621 - RNA, 22 nt, synthetic construct
  misc_feature 1..22: note = HBV-targeting guide sequence portion
  source 1..22: mol_type = other RNA
catcatacacaaaatcaaagaa

SEQ ID NO: 14622 - RNA, 22 nt, synthetic construct
  misc_feature 1..22: note = HBV-targeting guide sequence portion
  source 1..22: mol_type = other RNA
catcatccatataactgaaagc

SEQ ID NO: 14623 - RNA, 22 nt, synthetic construct
  misc_feature 1..22: note = HBV-targeting guide sequence portion
  source 1..22: mol_type = other RNA
catcatcctgggctttcggaaa

SEQ ID NO: 14624 - RNA, 22 nt, synthetic construct
  misc_feature 1..22: note = HBV-targeting guide sequence portion
  source 1..22: mol_type = other RNA
catccagcgataaccaggacaa

SEQ ID NO: 14625 - RNA, 22 nt, synthetic construct
  misc_feature 1..22: note = HBV-targeting guide sequence portion
  source 1..22: mol_type = other RNA
catccatataactgaaagccaa

SEQ ID NO: 14626 - RNA, 22 nt, synthetic construct
  misc_feature 1..22: note = HBV-targeting guide sequence portion
  source 1..22: mol_type = other RNA
catcccatcatcctgggctttc

SEQ ID NO: 14627 - RNA, 22 nt, synthetic construct
  misc_feature 1..22: note = HBV-targeting guide sequence portion
  source 1..22: mol_type = other RNA
catcccgatacagagctgcggc

SEQ ID NO: 14628 - RNA, 22 nt, synthetic construct
  misc_feature 1..22: note = HBV-targeting guide sequence portion
  source 1..22: mol_type = other RNA
catccgaaggttttgtacagca

SEQ ID NO: 14629 - RNA, 22 nt, synthetic construct
  misc_feature 1..22: note = HBV-targeting guide sequence portion
  source 1..22: mol_type = other RNA
catcctgctgctatgcctcatc

SEQ ID NO: 14630 - RNA, 22 nt, synthetic construct
  misc_feature 1..22: note = HBV-targeting guide sequence portion
  source 1..22: mol_type = other RNA
catcctgggctttcggaaaatt

SEQ ID NO: 14631 - RNA, 22 nt, synthetic construct
  misc_feature 1..22: note = HBV-targeting guide sequence portion
  source 1..22: mol_type = other RNA
catcgttcccatggctgctagg

SEQ ID NO: 14632 - RNA, 22 nt, synthetic construct
  misc_feature 1..22: note = HBV-targeting guide sequence portion
  source 1..22: mol_type = other RNA
catctacaccaagatattatca

SEQ ID NO: 14633 - RNA, 22 nt, synthetic construct
  misc_feature 1..22: note = HBV-targeting guide sequence portion
  source 1..22: mol_type = other RNA
catctagggacctagtagtcag

SEQ ID NO: 14634 - RNA, 22 nt, synthetic construct
  misc_feature 1..22: note = HBV-targeting guide sequence portion
  source 1..22: mol_type = other RNA
catctagttaatcattacttcc

SEQ ID NO: 14635 - RNA, 22 nt, synthetic construct
  misc_feature 1..22: note = HBV-targeting guide sequence portion
  source 1..22: mol_type = other RNA
catctcgaggccgcttggggcc

SEQ ID NO: 14636 - RNA, 22 nt, synthetic construct
  misc_feature 1..22: note = HBV-targeting guide sequence portion
  source 1..22: mol_type = other RNA
catctcttgttcatgtcctact

SEQ ID NO: 14637 - RNA, 22 nt, synthetic construct
  misc_feature 1..22: note = HBV-targeting guide sequence portion
  source 1..22: mol_type = other RNA
catctctttgttttgttagggt

SEQ ID NO: 14638 - RNA, 22 nt, synthetic construct
  misc_feature 1..22: note = HBV-targeting guide sequence portion
  source 1..22: mol_type = other RNA
catctgccggaccgtgtgcact

SEQ ID NO: 14639 - RNA, 22 nt, synthetic construct
  misc_feature 1..22: note = HBV-targeting guide sequence portion
  source 1..22: mol_type = other RNA
catcttcctcttcatcctgctg

SEQ ID NO: 14640 - RNA, 22 nt, synthetic construct
  misc_feature 1..22: note = HBV-targeting guide sequence portion
  source 1..22: mol_type = other RNA
catcttcttgttggttcttctg

SEQ ID NO: 14641 - RNA, 22 nt, synthetic construct
  misc_feature 1..22: note = HBV-targeting guide sequence portion
  source 1..22: mol_type = other RNA
catcttgagtccctttataccg

SEQ ID NO: 14642 - RNA, 22 nt, synthetic construct
  misc_feature 1..22: note = HBV-targeting guide sequence portion
  source 1..22: mol_type = other RNA
catgaaattaagagaataaccc

SEQ ID NO: 14643 - RNA, 22 nt, synthetic construct
  misc_feature 1..22: note = HBV-targeting guide sequence portion
  source 1..22: mol_type = other RNA
catgaacaagagatgattaggc

SEQ ID NO: 14644 - RNA, 22 nt, synthetic construct
  misc_feature 1..22: note = HBV-targeting guide sequence portion
  source 1..22: mol_type = other RNA
catgcaactttttcacctctgc

SEQ ID NO: 14645 - RNA, 22 nt, synthetic construct
  misc_feature 1..22: note = HBV-targeting guide sequence portion
  source 1..22: mol_type = other RNA
catgcatacaagggcattaaag

SEQ ID NO: 14646 - RNA, 22 nt, synthetic construct
  misc_feature 1..22: note = HBV-targeting guide sequence portion
  source 1..22: mol_type = other RNA
catgccctaaagccacccaagg

SEQ ID NO: 14647 - RNA, 22 nt, synthetic construct
  misc_feature 1..22: note = HBV-targeting guide sequence portion
  source 1..22: mol_type = other RNA
catgcgacgtgcagaggtgaag

SEQ ID NO: 14648 - RNA, 22 nt, synthetic construct
  misc_feature 1..22: note = HBV-targeting guide sequence portion
  source 1..22: mol_type = other RNA
catgcgctgatggcctatgacc

SEQ ID NO: 14649 - RNA, 22 nt, synthetic construct
  misc_feature 1..22: note = HBV-targeting guide sequence portion
  source 1..22: mol_type = other RNA
catgcgtggaacctttccggct

SEQ ID NO: 14650 - RNA, 22 nt, synthetic construct
  misc_feature 1..22: note = HBV-targeting guide sequence portion
  source 1..22: mol_type = other RNA
catgctgtagctcttgttccca

SEQ ID NO: 14651 - RNA, 22 nt, synthetic construct
  misc_feature 1..22: note = HBV-targeting guide sequence portion
  source 1..22: mol_type = other RNA
catggacattgacccatataaa

SEQ ID NO: 14652 - RNA, 22 nt, synthetic construct
  misc_feature 1..22: note = HBV-targeting guide sequence portion
  source 1..22: mol_type = other RNA
catggagaacatcacatcagga

SEQ ID NO: 14653 - RNA, 22 nt, synthetic construct
  misc_feature 1..22: note = HBV-targeting guide sequence portion
  source 1..22: mol_type = other RNA
catggagaccaccgtgaacgcc

SEQ ID NO: 14654 - RNA, 22 nt, synthetic construct
  misc_feature 1..22: note = HBV-targeting guide sequence portion
  source 1..22: mol_type = other RNA
catggcctgaggatgagtgttt

SEQ ID NO: 14655 - RNA, 22 nt, synthetic construct
  misc_feature 1..22: note = HBV-targeting guide sequence portion
  source 1..22: mol_type = other RNA
catggctgctaggctgtgctgc

SEQ ID NO: 14656 - RNA, 22 nt, synthetic construct
  misc_feature 1..22: note = HBV-targeting guide sequence portion
  source 1..22: mol_type = other RNA
catgggaacgatgtatatttgc

SEQ ID NO: 14657 - RNA, 22 nt, synthetic construct
  misc_feature 1..22: note = HBV-targeting guide sequence portion
  source 1..22: mol_type = other RNA
catgggctatgtcattgattgt

SEQ ID NO: 14658 - RNA, 22 nt, synthetic construct
  misc_feature 1..22: note = HBV-targeting guide sequence portion
  source 1..22: mol_type = other RNA
catggggcagaatctttccacc

SEQ ID NO: 14659 - RNA, 22 nt, synthetic construct
  misc_feature 1..22: note = HBV-targeting guide sequence portion
  source 1..22: mol_type = other RNA
catggtgctggtgcgcagacca

SEQ ID NO: 14660 - RNA, 22 nt, synthetic construct
  misc_feature 1..22: note = HBV-targeting guide sequence portion
  source 1..22: mol_type = other RNA
catgtattcaatctaagcaggc

SEQ ID NO: 14661 - RNA, 22 nt, synthetic construct
  misc_feature 1..22: note = HBV-targeting guide sequence portion
  source 1..22: mol_type = other RNA
catgtcctactgttcaagcctc

SEQ ID NO: 14662 - RNA, 22 nt, synthetic construct
  misc_feature 1..22: note = HBV-targeting guide sequence portion
  source 1..22: mol_type = other RNA
catgttcagcgcagggtcccca

SEQ ID NO: 14663 - RNA, 22 nt, synthetic construct
  misc_feature 1..22: note = HBV-targeting guide sequence portion
  source 1..22: mol_type = other RNA
cattaaagcaggataaccacat

SEQ ID NO: 14664 - RNA, 22 nt, synthetic construct
  misc_feature 1..22: note = HBV-targeting guide sequence portion
  source 1..22: mol_type = other RNA
cattaactgtaagcgggcctac

SEQ ID NO: 14665 - RNA, 22 nt, synthetic construct
  misc_feature 1..22: note = HBV-targeting guide sequence portion
  source 1..22: mol_type = other RNA
cattaatctaatctcctccccc

SEQ ID NO: 14666 - RNA, 22 nt, synthetic construct
  misc_feature 1..22: note = HBV-targeting guide sequence portion
  source 1..22: mol_type = other RNA
cattacttccaaactagacact

SEQ ID NO: 14667 - RNA, 22 nt, synthetic construct
  misc_feature 1..22: note = HBV-targeting guide sequence portion
  source 1..22: mol_type = other RNA
cattagttctccccagcaaaga

SEQ ID NO: 14668 - RNA, 22 nt, synthetic construct
  misc_feature 1..22: note = HBV-targeting guide sequence portion
  source 1..22: mol_type = other RNA
cattatgccctgagcctgaggg

SEQ ID NO: 14669 - RNA, 22 nt, synthetic construct
  misc_feature 1..22: note = HBV-targeting guide sequence portion
  source 1..22: mol_type = other RNA
cattcgggctagggttcacccc

SEQ ID NO: 14670 - RNA, 22 nt, synthetic construct
  misc_feature 1..22: note = HBV-targeting guide sequence portion
  source 1..22: mol_type = other RNA
cattctcgggactgacaactct

SEQ ID NO: 14671 - RNA, 22 nt, synthetic construct
  misc_feature 1..22: note = HBV-targeting guide sequence portion
  source 1..22: mol_type = other RNA
cattctgtgggtcaccatattc

SEQ ID NO: 14672 - RNA, 22 nt, synthetic construct
  misc_feature 1..22: note = HBV-targeting guide sequence portion
  source 1..22: mol_type = other RNA
cattctttgattttgtgtatga

SEQ ID NO: 14673 - RNA, 22 nt, synthetic construct
  misc_feature 1..22: note = HBV-targeting guide sequence portion
  source 1..22: mol_type = other RNA
cattgacccatataaagaattt

SEQ ID NO: 14674 - RNA, 22 nt, synthetic construct
  misc_feature 1..22: note = HBV-targeting guide sequence portion
  source 1..22: mol_type = other RNA
cattgagatccccgagattgag

SEQ ID NO: 14675 - RNA, 22 nt, synthetic construct
  misc_feature 1..22: note = HBV-targeting guide sequence portion
  source 1..22: mol_type = other RNA
cattgattgttggggatcattg

SEQ ID NO: 14676 - RNA, 22 nt, synthetic construct
  misc_feature 1..22: note = HBV-targeting guide sequence portion
  source 1..22: mol_type = other RNA
cattgcagagagtccaagagtc

SEQ ID NO: 14677 - RNA, 22 nt, synthetic construct
  misc_feature 1..22: note = HBV-targeting guide sequence portion
  source 1..22: mol_type = other RNA
cattgccacaaaatcacatcat

SEQ ID NO: 14678 - RNA, 22 nt, synthetic construct
  misc_feature 1..22: note = HBV-targeting guide sequence portion
  source 1..22: mol_type = other RNA
cattggaaaacaccctcttttc

SEQ ID NO: 14679 - RNA, 22 nt, synthetic construct
  misc_feature 1..22: note = HBV-targeting guide sequence portion
  source 1..22: mol_type = other RNA
cattgtgtaaaaggggcagcaa

SEQ ID NO: 14680 - RNA, 22 nt, synthetic construct
  misc_feature 1..22: note = HBV-targeting guide sequence portion
  source 1..22: mol_type = other RNA
cattgttcacctcaccatactg

SEQ ID NO: 14681 - RNA, 22 nt, synthetic construct
  misc_feature 1..22: note = HBV-targeting guide sequence portion
  source 1..22: mol_type = other RNA
catttaaaccctaacaaaacaa

SEQ ID NO: 14682 - RNA, 22 nt, synthetic construct
  misc_feature 1..22: note = HBV-targeting guide sequence portion
  source 1..22: mol_type = other RNA
catttcttgtcttacttttgga

SEQ ID NO: 14683 - RNA, 22 nt, synthetic construct
  misc_feature 1..22: note = HBV-targeting guide sequence portion
  source 1..22: mol_type = other RNA
catttggtggtctataagctgg

SEQ ID NO: 14684 - RNA, 22 nt, synthetic construct
  misc_feature 1..22: note = HBV-targeting guide sequence portion
  source 1..22: mol_type = other RNA
catttgttcagtggttcgtagg

SEQ ID NO: 14685 - RNA, 22 nt, synthetic construct
  misc_feature 1..22: note = HBV-targeting guide sequence portion
  source 1..22: mol_type = other RNA
cattttttgataatatcttggt

SEQ ID NO: 14686 - RNA, 22 nt, synthetic construct
  misc_feature 1..22: note = HBV-targeting guide sequence portion
  source 1..22: mol_type = other RNA
ccaaaagacaccaaatactcta

SEQ ID NO: 14687 - RNA, 22 nt, synthetic construct
  misc_feature 1..22: note = HBV-targeting guide sequence portion
  source 1..22: mol_type = other RNA
ccaaaaggcctccgtgcggtgg

SEQ ID NO: 14688 - RNA, 22 nt, synthetic construct
  misc_feature 1..22: note = HBV-targeting guide sequence portion
  source 1..22: mol_type = other RNA
ccaaaagtaagacaagaaatgt

SEQ ID NO: 14689 - RNA, 22 nt, synthetic construct
  misc_feature 1..22: note = HBV-targeting guide sequence portion
  source 1..22: mol_type = other RNA
ccaaaattcgcagtccccaacc

SEQ ID NO: 14690 - RNA, 22 nt, synthetic construct
  misc_feature 1..22: note = HBV-targeting guide sequence portion
  source 1..22: mol_type = other RNA
ccaaacagtgggggaaagccct

SEQ ID NO: 14691 - RNA, 22 nt, synthetic construct
  misc_feature 1..22: note = HBV-targeting guide sequence portion
  source 1..22: mol_type = other RNA
ccaaactagacactatttacac

SEQ ID NO: 14692 - RNA, 22 nt, synthetic construct
  misc_feature 1..22: note = HBV-targeting guide sequence portion
  source 1..22: mol_type = other RNA
ccaaactctgcaagatcccaga

SEQ ID NO: 14693 - RNA, 22 nt, synthetic construct
  misc_feature 1..22: note = HBV-targeting guide sequence portion
  source 1..22: mol_type = other RNA
ccaaagacaaaagaaaattggt

SEQ ID NO: 14694 - RNA, 22 nt, synthetic construct
  misc_feature 1..22: note = HBV-targeting guide sequence portion
  source 1..22: mol_type = other RNA
ccaaatactctaggaccgtttc

SEQ ID NO: 14695 - RNA, 22 nt, synthetic construct
  misc_feature 1..22: note = HBV-targeting guide sequence portion
  source 1..22: mol_type = other RNA
ccaaatacttgcccttggataa

SEQ ID NO: 14696 - RNA, 22 nt, synthetic construct
  misc_feature 1..22: note = HBV-targeting guide sequence portion
  source 1..22: mol_type = other RNA
ccaaatgcccctatcctatcaa

SEQ ID NO: 14697 - RNA, 22 nt, synthetic construct
  misc_feature 1..22: note = HBV-targeting guide sequence portion
  source 1..22: mol_type = other RNA
ccaaattctttatatgggtcaa

SEQ ID NO: 14698 - RNA, 22 nt, synthetic construct
  misc_feature 1..22: note = HBV-targeting guide sequence portion
  source 1..22: mol_type = other RNA
ccaacaagaagatgaggcatag

SEQ ID NO: 14699 - RNA, 22 nt, synthetic construct
  misc_feature 1..22: note = HBV-targeting guide sequence portion
  source 1..22: mol_type = other RNA
ccaacaaggatccctggccaga

SEQ ID NO: 14700 - RNA, 22 nt, synthetic construct
  misc_feature 1..22: note = HBV-targeting guide sequence portion
  source 1..22: mol_type = other RNA
ccaacaaggtaggagctggagc

SEQ ID NO: 14701 - RNA, 22 nt, synthetic construct
  misc_feature 1..22: note = HBV-targeting guide sequence portion
  source 1..22: mol_type = other RNA
ccaacaatcaatgacatagccc

SEQ ID NO: 14702 - RNA, 22 nt, synthetic construct
  misc_feature 1..22: note = HBV-targeting guide sequence portion
  source 1..22: mol_type = other RNA
ccaacaatccagattgggactt

SEQ ID NO: 14703 - RNA, 22 nt, synthetic construct
  misc_feature 1..22: note = HBV-targeting guide sequence portion
  source 1..22: mol_type = other RNA
ccaaccagtgggggttgcatca

SEQ ID NO: 14704 - RNA, 22 nt, synthetic construct
  misc_feature 1..22: note = HBV-targeting guide sequence portion
  source 1..22: mol_type = other RNA
ccaacctccaatcactcaccaa

SEQ ID NO: 14705 - RNA, 22 nt, synthetic construct
  misc_feature 1..22: note = HBV-targeting guide sequence portion
  source 1..22: mol_type = other RNA
ccaacctcctgtcctccaactt

SEQ ID NO: 14706 - RNA, 22 nt, synthetic construct
  misc_feature 1..22: note = HBV-targeting guide sequence portion
  source 1..22: mol_type = other RNA
ccaactcctcccagtctttaaa

SEQ ID NO: 14707 - RNA, 22 nt, synthetic construct
  misc_feature 1..22: note = HBV-targeting guide sequence portion
  source 1..22: mol_type = other RNA
ccaactggatcctgcgcgggac

SEQ ID NO: 14708 - RNA, 22 nt, synthetic construct
  misc_feature 1..22: note = HBV-targeting guide sequence portion
  source 1..22: mol_type = other RNA
ccaactggtggtcgggaaagaa

SEQ ID NO: 14709 - RNA, 22 nt, synthetic construct
  misc_feature 1..22: note = HBV-targeting guide sequence portion
  source 1..22: mol_type = other RNA
ccaacttacaaggcctttctgt

SEQ ID NO: 14710 - RNA, 22 nt, synthetic construct
  misc_feature 1..22: note = HBV-targeting guide sequence portion
  source 1..22: mol_type = other RNA
ccaacttgtcctggttatcgct

SEQ ID NO: 14711 - RNA, 22 nt, synthetic construct
  misc_feature 1..22: note = HBV-targeting guide sequence portion
  source 1..22: mol_type = other RNA
ccaagaatatggtgacccacag

SEQ ID NO: 14712 - RNA, 22 nt, synthetic construct
  misc_feature 1..22: note = HBV-targeting guide sequence portion
  source 1..22: mol_type = other RNA
ccaagacacacggtagttcccc

SEQ ID NO: 14713 - RNA, 22 nt, synthetic construct
  misc_feature 1..22: note = HBV-targeting guide sequence portion
  source 1..22: mol_type = other RNA
ccaagagaaacgggctgaggcc

SEQ ID NO: 14714 - RNA, 22 nt, synthetic construct
  misc_feature 1..22: note = HBV-targeting guide sequence portion
  source 1..22: mol_type = other RNA
ccaagagtcctcttatgtaaga

SEQ ID NO: 14715 - RNA, 22 nt, synthetic construct
  misc_feature 1..22: note = HBV-targeting guide sequence portion
  source 1..22: mol_type = other RNA
ccaagatattatcaaaaaatgt

SEQ ID NO: 14716 - RNA, 22 nt, synthetic construct
  misc_feature 1..22: note = HBV-targeting guide sequence portion
  source 1..22: mol_type = other RNA
ccaagccccaaccagtgggggt

SEQ ID NO: 14717 - RNA, 22 nt, synthetic construct
  misc_feature 1..22: note = HBV-targeting guide sequence portion
  source 1..22: mol_type = other RNA
ccaagcggcctcgagatgggtc

SEQ ID NO: 14718 - RNA, 22 nt, synthetic construct
  misc_feature 1..22: note = HBV-targeting guide sequence portion
  source 1..22: mol_type = other RNA
ccaagctgtgccttgggtggct

SEQ ID NO: 14719 - RNA, 22 nt, synthetic construct
  misc_feature 1..22: note = HBV-targeting guide sequence portion
  source 1..22: mol_type = other RNA
ccaaggcacagcttggaggctt

SEQ ID NO: 14720 - RNA, 22 nt, synthetic construct
  misc_feature 1..22: note = HBV-targeting guide sequence portion
  source 1..22: mol_type = other RNA
ccaaggcatcccgatacagagc

SEQ ID NO: 14721 - RNA, 22 nt, synthetic construct
  misc_feature 1..22: note = HBV-targeting guide sequence portion
  source 1..22: mol_type = other RNA
ccaagggatactaacattgaga

SEQ ID NO: 14722 - RNA, 22 nt, synthetic construct
  misc_feature 1..22: note = HBV-targeting guide sequence portion
  source 1..22: mol_type = other RNA
ccaagggcaagtatttggtgaa

SEQ ID NO: 14723 - RNA, 22 nt, synthetic construct
  misc_feature 1..22: note = HBV-targeting guide sequence portion
  source 1..22: mol_type = other RNA
ccaaggtcttacataagaggac

SEQ ID NO: 14724 - RNA, 22 nt, synthetic construct
  misc_feature 1..22: note = HBV-targeting guide sequence portion
  source 1..22: mol_type = other RNA
ccaagtctgtacagcatcttga

SEQ ID NO: 14725 - RNA, 22 nt, synthetic construct
  misc_feature 1..22: note = HBV-targeting guide sequence portion
  source 1..22: mol_type = other RNA
ccaagtgtttgctgatgcaacc

SEQ ID NO: 14726 - RNA, 22 nt, synthetic construct
  misc_feature 1..22: note = HBV-targeting guide sequence portion
  source 1..22: mol_type = other RNA
ccaataccacatcatccatata

SEQ ID NO: 14727 - RNA, 22 nt, synthetic construct
  misc_feature 1..22: note = HBV-targeting guide sequence portion
  source 1..22: mol_type = other RNA
ccaatcaataggcctgttaacc

SEQ ID NO: 14728 - RNA, 22 nt, synthetic construct
  misc_feature 1..22: note = HBV-targeting guide sequence portion
  source 1..22: mol_type = other RNA
ccaatcactcaccaacctcctg

SEQ ID NO: 14729 - RNA, 22 nt, synthetic construct
  misc_feature 1..22: note = HBV-targeting guide sequence portion
  source 1..22: mol_type = other RNA
ccaatcctcgagaagattgacg

SEQ ID NO: 14730 - RNA, 22 nt, synthetic construct
  misc_feature 1..22: note = HBV-targeting guide sequence portion
  source 1..22: mol_type = other RNA
ccaatcgccagtcaggacggca

SEQ ID NO: 14731 - RNA, 22 nt, synthetic construct
  misc_feature 1..22: note = HBV-targeting guide sequence portion
  source 1..22: mol_type = other RNA
ccaatctggattgttggagttt

SEQ ID NO: 14732 - RNA, 22 nt, synthetic construct
  misc_feature 1..22: note = HBV-targeting guide sequence portion
  source 1..22: mol_type = other RNA
ccaatgagggttaaagacaggt

SEQ ID NO: 14733 - RNA, 22 nt, synthetic construct
  misc_feature 1..22: note = HBV-targeting guide sequence portion
  source 1..22: mol_type = other RNA
ccaattcttgcccaaggtctta

SEQ ID NO: 14734 - RNA, 22 nt, synthetic construct
  misc_feature 1..22: note = HBV-targeting guide sequence portion
  source 1..22: mol_type = other RNA
ccaatttatgcctacagcctcc

SEQ ID NO: 14735 - RNA, 22 nt, synthetic construct
  misc_feature 1..22: note = HBV-targeting guide sequence portion
  source 1..22: mol_type = other RNA
ccaattttcttttgtctttggg

SEQ ID NO: 14736 - RNA, 22 nt, synthetic construct
  misc_feature 1..22: note = HBV-targeting guide sequence portion
  source 1..22: mol_type = other RNA
ccacaaaatcacatcatacaca

SEQ ID NO: 14737 - RNA, 22 nt, synthetic construct
  misc_feature 1..22: note = HBV-targeting guide sequence portion
  source 1..22: mol_type = other RNA
ccacaaccttccaccaaactct

SEQ ID NO: 14738 - RNA, 22 nt, synthetic construct
  misc_feature 1..22: note = HBV-targeting guide sequence portion
  source 1..22: mol_type = other RNA
ccacaatagttgtctgaacttt

SEQ ID NO: 14739 - RNA, 22 nt, synthetic construct
  misc_feature 1..22: note = HBV-targeting guide sequence portion
  source 1..22: mol_type = other RNA
ccacaattcgttgacacacttt

SEQ ID NO: 14740 - RNA, 22 nt, synthetic construct
  misc_feature 1..22: note = HBV-targeting guide sequence portion
  source 1..22: mol_type = other RNA
ccacactccaaaagacaccaaa

SEQ ID NO: 14741 - RNA, 22 nt, synthetic construct
  misc_feature 1..22: note = HBV-targeting guide sequence portion
  source 1..22: mol_type = other RNA
ccacagaatgaggcgctatgtg

SEQ ID NO: 14742 - RNA, 22 nt, synthetic construct
  misc_feature 1..22: note = HBV-targeting guide sequence portion
  source 1..22: mol_type = other RNA
ccacagtagctccaaattcttt

SEQ ID NO: 14743 - RNA, 22 nt, synthetic construct
  misc_feature 1..22: note = HBV-targeting guide sequence portion
  source 1..22: mol_type = other RNA
ccacatcatccatataactgaa

SEQ ID NO: 14744 - RNA, 22 nt, synthetic construct
  misc_feature 1..22: note = HBV-targeting guide sequence portion
  source 1..22: mol_type = other RNA
ccacattgtgtaaaaggggcag

SEQ ID NO: 14745 - RNA, 22 nt, synthetic construct
  misc_feature 1..22: note = HBV-targeting guide sequence portion
  source 1..22: mol_type = other RNA
ccaccaaactctgcaagatccc

SEQ ID NO: 14746 - RNA, 22 nt, synthetic construct
  misc_feature 1..22: note = HBV-targeting guide sequence portion
  source 1..22: mol_type = other RNA
ccaccaaatgcccctatcctat

SEQ ID NO: 14747 - RNA, 22 nt, synthetic construct
  misc_feature 1..22: note = HBV-targeting guide sequence portion
  source 1..22: mol_type = other RNA
ccaccaattcttgcccaaggtc

SEQ ID NO: 14748 - RNA, 22 nt, synthetic construct
  misc_feature 1..22: note = HBV-targeting guide sequence portion
  source 1..22: mol_type = other RNA
ccaccacgagtctagactctgc

SEQ ID NO: 14749 - RNA, 22 nt, synthetic construct
  misc_feature 1..22: note = HBV-targeting guide sequence portion
  source 1..22: mol_type = other RNA
ccaccagcaatcctctgggatt

SEQ ID NO: 14750 - RNA, 22 nt, synthetic construct
  misc_feature 1..22: note = HBV-targeting guide sequence portion
  source 1..22: mol_type = other RNA
ccaccagcacgggaccctgcag

SEQ ID NO: 14751 - RNA, 22 nt, synthetic construct
  misc_feature 1..22: note = HBV-targeting guide sequence portion
  source 1..22: mol_type = other RNA
ccaccagcagggagatacaggc

SEQ ID NO: 14752 - RNA, 22 nt, synthetic construct
  misc_feature 1..22: note = HBV-targeting guide sequence portion
  source 1..22: mol_type = other RNA
ccaccagttggacccagccttc

SEQ ID NO: 14753 - RNA, 22 nt, synthetic construct
  misc_feature 1..22: note = HBV-targeting guide sequence portion
  source 1..22: mol_type = other RNA
ccacccaaggcacagcttggag

SEQ ID NO: 14754 - RNA, 22 nt, synthetic construct
  misc_feature 1..22: note = HBV-targeting guide sequence portion
  source 1..22: mol_type = other RNA
ccacccaggtagctagagtcat

SEQ ID NO: 14755 - RNA, 22 nt, synthetic construct
  misc_feature 1..22: note = HBV-targeting guide sequence portion
  source 1..22: mol_type = other RNA
ccaccccaaaaggcctccgtgc

SEQ ID NO: 14756 - RNA, 22 nt, synthetic construct
  misc_feature 1..22: note = HBV-targeting guide sequence portion
  source 1..22: mol_type = other RNA
ccaccgcacggaggccttttgg

SEQ ID NO: 14757 - RNA, 22 nt, synthetic construct
  misc_feature 1..22: note = HBV-targeting guide sequence portion
  source 1..22: mol_type = other RNA
ccaccgtgaacgcccaccaatt

SEQ ID NO: 14758 - RNA, 22 nt, synthetic construct
  misc_feature 1..22: note = HBV-targeting guide sequence portion
  source 1..22: mol_type = other RNA
ccacctctgagaaacactcatc

SEQ ID NO: 14759 - RNA, 22 nt, synthetic construct
  misc_feature 1..22: note = HBV-targeting guide sequence portion
  source 1..22: mol_type = other RNA
ccaccttatgagtccaagggat

SEQ ID NO: 14760 - RNA, 22 nt, synthetic construct
  misc_feature 1..22: note = HBV-targeting guide sequence portion
  source 1..22: mol_type = other RNA
ccacgagtctagactctgcggt

SEQ ID NO: 14761 - RNA, 22 nt, synthetic construct
  misc_feature 1..22: note = HBV-targeting guide sequence portion
  source 1..22: mol_type = other RNA
ccacgcatgcgctgatggccta

SEQ ID NO: 14762 - RNA, 22 nt, synthetic construct
  misc_feature 1..22: note = HBV-targeting guide sequence portion
  source 1..22: mol_type = other RNA
ccacggggcgcacctctcttta

SEQ ID NO: 14763 - RNA, 22 nt, synthetic construct
  misc_feature 1..22: note = HBV-targeting guide sequence portion
  source 1..22: mol_type = other RNA
ccactcccataggaattttccg

SEQ ID NO: 14764 - RNA, 22 nt, synthetic construct
  misc_feature 1..22: note = HBV-targeting guide sequence portion
  source 1..22: mol_type = other RNA
ccactgaacaaatggcactagt

SEQ ID NO: 14765 - RNA, 22 nt, synthetic construct
  misc_feature 1..22: note = HBV-targeting guide sequence portion
  source 1..22: mol_type = other RNA
ccactgcatggcctgaggatga

SEQ ID NO: 14766 - RNA, 22 nt, synthetic construct
  misc_feature 1..22: note = HBV-targeting guide sequence portion
  source 1..22: mol_type = other RNA
ccactggttggggcttggtcat

SEQ ID NO: 14767 - RNA, 22 nt, synthetic construct
  misc_feature 1..22: note = HBV-targeting guide sequence portion
  source 1..22: mol_type = other RNA
ccactgtttggctttcagttat

SEQ ID NO: 14768 - RNA, 22 nt, synthetic construct
  misc_feature 1..22: note = HBV-targeting guide sequence portion
  source 1..22: mol_type = other RNA
ccagaacatctagttaatcatt

SEQ ID NO: 14769 - RNA, 22 nt, synthetic construct
  misc_feature 1..22: note = HBV-targeting guide sequence portion
  source 1..22: mol_type = other RNA
ccagaagaaccaacaagaagat

SEQ ID NO: 14770 - RNA, 22 nt, synthetic construct
  misc_feature 1..22: note = HBV-targeting guide sequence portion
  source 1..22: mol_type = other RNA
ccagaagacccacaattcgttg

SEQ ID NO: 14771 - RNA, 22 nt, synthetic construct
  misc_feature 1..22: note = HBV-targeting guide sequence portion
  source 1..22: mol_type = other RNA
ccagaccggctgcgagcaaaac

SEQ ID NO: 14772 - RNA, 22 nt, synthetic construct
  misc_feature 1..22: note = HBV-targeting guide sequence portion
  source 1..22: mol_type = other RNA
ccagacgccaacaaggtaggag

SEQ ID NO: 14773 - RNA, 22 nt, synthetic construct
  misc_feature 1..22: note = HBV-targeting guide sequence portion
  source 1..22: mol_type = other RNA
ccagaggattgctggtggaaag

SEQ ID NO: 14774 - RNA, 22 nt, synthetic construct
  misc_feature 1..22: note = HBV-targeting guide sequence portion
  source 1..22: mol_type = other RNA
ccagagtgagaggcctgtatct

SEQ ID NO: 14775 - RNA, 22 nt, synthetic construct
  misc_feature 1..22: note = HBV-targeting guide sequence portion
  source 1..22: mol_type = other RNA
ccagattgggacttcaatccca

SEQ ID NO: 14776 - RNA, 22 nt, synthetic construct
  misc_feature 1..22: note = HBV-targeting guide sequence portion
  source 1..22: mol_type = other RNA
ccagcaaagaattgcttgcctg

SEQ ID NO: 14777 - RNA, 22 nt, synthetic construct
  misc_feature 1..22: note = HBV-targeting guide sequence portion
  source 1..22: mol_type = other RNA
ccagcaaatccgcctcctgcct

SEQ ID NO: 14778 - RNA, 22 nt, synthetic construct
  misc_feature 1..22: note = HBV-targeting guide sequence portion
  source 1..22: mol_type = other RNA
ccagcaatcctctgggattctt

SEQ ID NO: 14779 - RNA, 22 nt, synthetic construct
  misc_feature 1..22: note = HBV-targeting guide sequence portion
  source 1..22: mol_type = other RNA
ccagcaccatgcaactttttca

SEQ ID NO: 14780 - RNA, 22 nt, synthetic construct
  misc_feature 1..22: note = HBV-targeting guide sequence portion
  source 1..22: mol_type = other RNA
ccagcacgggaccctgcagaac

SEQ ID NO: 14781 - RNA, 22 nt, synthetic construct
  misc_feature 1..22: note = HBV-targeting guide sequence portion
  source 1..22: mol_type = other RNA
ccagcagggagatacaggcctc

SEQ ID NO: 14782 - RNA, 22 nt, synthetic construct
  misc_feature 1..22: note = HBV-targeting guide sequence portion
  source 1..22: mol_type = other RNA
ccagccttcagagcaaactcca

SEQ ID NO: 14783 - RNA, 22 nt, synthetic construct
  misc_feature 1..22: note = HBV-targeting guide sequence portion
  source 1..22: mol_type = other RNA
ccagcgataaccaggacaagtt

SEQ ID NO: 14784 - RNA, 22 nt, synthetic construct
  misc_feature 1..22: note = HBV-targeting guide sequence portion
  source 1..22: mol_type = other RNA
ccagctcctaccttgttggcgt

SEQ ID NO: 14785 - RNA, 22 nt, synthetic construct
  misc_feature 1..22: note = HBV-targeting guide sequence portion
  source 1..22: mol_type = other RNA
ccagcttatagaccaccaaatg

SEQ ID NO: 14786 - RNA, 22 nt, synthetic construct
  misc_feature 1..22: note = HBV-targeting guide sequence portion
  source 1..22: mol_type = other RNA
ccaggacaagttggaggacagg

SEQ ID NO: 14787 - RNA, 22 nt, synthetic construct
  misc_feature 1..22: note = HBV-targeting guide sequence portion
  source 1..22: mol_type = other RNA
ccaggatcatcaaccaccagca

SEQ ID NO: 14788 - RNA, 22 nt, synthetic construct
  misc_feature 1..22: note = HBV-targeting guide sequence portion
  source 1..22: mol_type = other RNA
ccaggatgatgggatgggaata

SEQ ID NO: 14789 - RNA, 22 nt, synthetic construct
  misc_feature 1..22: note = HBV-targeting guide sequence portion
  source 1..22: mol_type = other RNA
ccaggcaacggccaggtctgtg

SEQ ID NO: 14790 - RNA, 22 nt, synthetic construct
  misc_feature 1..22: note = HBV-targeting guide sequence portion
  source 1..22: mol_type = other RNA
ccagggatccttgttgggattg

SEQ ID NO: 14791 - RNA, 22 nt, synthetic construct
  misc_feature 1..22: note = HBV-targeting guide sequence portion
  source 1..22: mol_type = other RNA
ccaggtagctagagtcattagt

SEQ ID NO: 14792 - RNA, 22 nt, synthetic construct
  misc_feature 1..22: note = HBV-targeting guide sequence portion
  source 1..22: mol_type = other RNA
ccaggtctgtgccaagtgtttg

SEQ ID NO: 14793 - RNA, 22 nt, synthetic construct
  misc_feature 1..22: note = HBV-targeting guide sequence portion
  source 1..22: mol_type = other RNA
ccagtcaggacggcagcctacc

SEQ ID NO: 14794 - RNA, 22 nt, synthetic construct
  misc_feature 1..22: note = HBV-targeting guide sequence portion
  source 1..22: mol_type = other RNA
ccagtctttaaacaaacagtct

SEQ ID NO: 14795 - RNA, 22 nt, synthetic construct
  misc_feature 1..22: note = HBV-targeting guide sequence portion
  source 1..22: mol_type = other RNA
ccagtgggggttgcatcagcaa

SEQ ID NO: 14796 - RNA, 22 nt, synthetic construct
  misc_feature 1..22: note = HBV-targeting guide sequence portion
  source 1..22: mol_type = other RNA
ccagttcaggaacagtaaaccc

SEQ ID NO: 14797 - RNA, 22 nt, synthetic construct
  misc_feature 1..22: note = HBV-targeting guide sequence portion
  source 1..22: mol_type = other RNA
ccagttggacccagccttcaga

SEQ ID NO: 14798 - RNA, 22 nt, synthetic construct
  misc_feature 1..22: note = HBV-targeting guide sequence portion
  source 1..22: mol_type = other RNA
ccagttggcagcacagcctagc

SEQ ID NO: 14799 - RNA, 22 nt, synthetic construct
  misc_feature 1..22: note = HBV-targeting guide sequence portion
  source 1..22: mol_type = other RNA
ccatactgcactcaggcaagca

SEQ ID NO: 14800 - RNA, 22 nt, synthetic construct
  misc_feature 1..22: note = HBV-targeting guide sequence portion
  source 1..22: mol_type = other RNA
ccatactgcggaactcctagcc

SEQ ID NO: 14801 - RNA, 22 nt, synthetic construct
  misc_feature 1..22: note = HBV-targeting guide sequence portion
  source 1..22: mol_type = other RNA
ccatagagtgtgtaaatagtgt

SEQ ID NO: 14802 - RNA, 22 nt, synthetic construct
  misc_feature 1..22: note = HBV-targeting guide sequence portion
  source 1..22: mol_type = other RNA
ccataggaattttccgaaagcc

SEQ ID NO: 14803 - RNA, 22 nt, synthetic construct
  misc_feature 1..22: note = HBV-targeting guide sequence portion
  source 1..22: mol_type = other RNA
ccatataaagaatttggagcta

SEQ ID NO: 14804 - RNA, 22 nt, synthetic construct
  misc_feature 1..22: note = HBV-targeting guide sequence portion
  source 1..22: mol_type = other RNA
ccatataactgaaagccaaaca

SEQ ID NO: 14805 - RNA, 22 nt, synthetic construct
  misc_feature 1..22: note = HBV-targeting guide sequence portion
  source 1..22: mol_type = other RNA
ccatatgagtgttgacataact

SEQ ID NO: 14806 - RNA, 22 nt, synthetic construct
  misc_feature 1..22: note = HBV-targeting guide sequence portion
  source 1..22: mol_type = other RNA
ccatattcttgggaacaagagc

SEQ ID NO: 14807 - RNA, 22 nt, synthetic construct
  misc_feature 1..22: note = HBV-targeting guide sequence portion
  source 1..22: mol_type = other RNA
ccatcagcgcatgcgtggaacc

SEQ ID NO: 14808 - RNA, 22 nt, synthetic construct
  misc_feature 1..22: note = HBV-targeting guide sequence portion
  source 1..22: mol_type = other RNA
ccatcatcctgggctttcggaa

SEQ ID NO: 14809 - RNA, 22 nt, synthetic construct
  misc_feature 1..22: note = HBV-targeting guide sequence portion
  source 1..22: mol_type = other RNA
ccatcccatcatcctgggcttt

SEQ ID NO: 14810 - RNA, 22 nt, synthetic construct
  misc_feature 1..22: note = HBV-targeting guide sequence portion
  source 1..22: mol_type = other RNA
ccatccgaaggttttgtacagc

SEQ ID NO: 14811 - RNA, 22 nt, synthetic construct
  misc_feature 1..22: note = HBV-targeting guide sequence portion
  source 1..22: mol_type = other RNA
ccatctcgaggccgcttggggc

SEQ ID NO: 14812 - RNA, 22 nt, synthetic construct
  misc_feature 1..22: note = HBV-targeting guide sequence portion
  source 1..22: mol_type = other RNA
ccatctctttgttttgttaggg

SEQ ID NO: 14813 - RNA, 22 nt, synthetic construct
  misc_feature 1..22: note = HBV-targeting guide sequence portion
  source 1..22: mol_type = other RNA
ccatgaaattaagagaataacc

SEQ ID NO: 14814 - RNA, 22 nt, synthetic construct
  misc_feature 1..22: note = HBV-targeting guide sequence portion
  source 1..22: mol_type = other RNA
ccatgcaactttttcacctctg

SEQ ID NO: 14815 - RNA, 22 nt, synthetic construct
  misc_feature 1..22: note = HBV-targeting guide sequence portion
  source 1..22: mol_type = other RNA
ccatgccctaaagccacccaag

SEQ ID NO: 14816 - RNA, 22 nt, synthetic construct
  misc_feature 1..22: note = HBV-targeting guide sequence portion
  source 1..22: mol_type = other RNA
ccatgcgacgtgcagaggtgaa

SEQ ID NO: 14817 - RNA, 22 nt, synthetic construct
  misc_feature 1..22: note = HBV-targeting guide sequence portion
  source 1..22: mol_type = other RNA
ccatgctgtagctcttgttccc

SEQ ID NO: 14818 - RNA, 22 nt, synthetic construct
  misc_feature 1..22: note = HBV-targeting guide sequence portion
  source 1..22: mol_type = other RNA
ccatggctgctaggctgtgctg

SEQ ID NO: 14819 - RNA, 22 nt, synthetic construct
  misc_feature 1..22: note = HBV-targeting guide sequence portion
  source 1..22: mol_type = other RNA
ccatgggaacgatgtatatttg

SEQ ID NO: 14820 - RNA, 22 nt, synthetic construct
  misc_feature 1..22: note = HBV-targeting guide sequence portion
  source 1..22: mol_type = other RNA
ccatgttcagcgcagggtcccc

SEQ ID NO: 14821 - RNA, 22 nt, synthetic construct
  misc_feature 1..22: note = HBV-targeting guide sequence portion
  source 1..22: mol_type = other RNA
ccatttgttcagtggttcgtag

SEQ ID NO: 14822 - RNA, 22 nt, synthetic construct
  misc_feature 1..22: note = HBV-targeting guide sequence portion
  source 1..22: mol_type = other RNA
cccaaaaggcctccgtgcggtg

SEQ ID NO: 14823 - RNA, 22 nt, synthetic construct
  misc_feature 1..22: note = HBV-targeting guide sequence portion
  source 1..22: mol_type = other RNA
cccaaagacaaaagaaaattgg

SEQ ID NO: 14824 - RNA, 22 nt, synthetic construct
  misc_feature 1..22: note = HBV-targeting guide sequence portion
  source 1..22: mol_type = other RNA
cccaacaaggatccctggccag

SEQ ID NO: 14825 - RNA, 22 nt, synthetic construct
  misc_feature 1..22: note = HBV-targeting guide sequence portion
  source 1..22: mol_type = other RNA
cccaacaatcaatgacatagcc

SEQ ID NO: 14826 - RNA, 22 nt, synthetic construct
  misc_feature 1..22: note = HBV-targeting guide sequence portion
  source 1..22: mol_type = other RNA
cccaaccagtgggggttgcatc

SEQ ID NO: 14827 - RNA, 22 nt, synthetic construct
  misc_feature 1..22: note = HBV-targeting guide sequence portion
  source 1..22: mol_type = other RNA
cccaacctccaatcactcacca

SEQ ID NO: 14828 - RNA, 22 nt, synthetic construct
  misc_feature 1..22: note = HBV-targeting guide sequence portion
  source 1..22: mol_type = other RNA
cccaactcctcccagtctttaa

SEQ ID NO: 14829 - RNA, 22 nt, synthetic construct
  misc_feature 1..22: note = HBV-targeting guide sequence portion
  source 1..22: mol_type = other RNA
cccaagaatatggtgacccaca

SEQ ID NO: 14830 - RNA, 22 nt, synthetic construct
  misc_feature 1..22: note = HBV-targeting guide sequence portion
  source 1..22: mol_type = other RNA
cccaagcggcctcgagatgggt

SEQ ID NO: 14831 - RNA, 22 nt, synthetic construct
  misc_feature 1..22: note = HBV-targeting guide sequence portion
  source 1..22: mol_type = other RNA
cccaaggcacagcttggaggct

SEQ ID NO: 14832 - RNA, 22 nt, synthetic construct
  misc_feature 1..22: note = HBV-targeting guide sequence portion
  source 1..22: mol_type = other RNA
cccaaggtcttacataagagga

SEQ ID NO: 14833 - RNA, 22 nt, synthetic construct
  misc_feature 1..22: note = HBV-targeting guide sequence portion
  source 1..22: mol_type = other RNA
cccaataccacatcatccatat

SEQ ID NO: 14834 - RNA, 22 nt, synthetic construct
  misc_feature 1..22: note = HBV-targeting guide sequence portion
  source 1..22: mol_type = other RNA
cccaatcctcgagaagattgac

SEQ ID NO: 14835 - RNA, 22 nt, synthetic construct
  misc_feature 1..22: note = HBV-targeting guide sequence portion
  source 1..22: mol_type = other RNA
cccaatctggattgttggagtt

SEQ ID NO: 14836 - RNA, 22 nt, synthetic construct
  misc_feature 1..22: note = HBV-targeting guide sequence portion
  source 1..22: mol_type = other RNA
cccacaattcgttgacacactt

SEQ ID NO: 14837 - RNA, 22 nt, synthetic construct
  misc_feature 1..22: note = HBV-targeting guide sequence portion
  source 1..22: mol_type = other RNA
cccacagaatgaggcgctatgt

SEQ ID NO: 14838 - RNA, 22 nt, synthetic construct
  misc_feature 1..22: note = HBV-targeting guide sequence portion
  source 1..22: mol_type = other RNA
cccaccaattcttgcccaaggt

SEQ ID NO: 14839 - RNA, 22 nt, synthetic construct
  misc_feature 1..22: note = HBV-targeting guide sequence portion
  source 1..22: mol_type = other RNA
cccacccaggtagctagagtca

SEQ ID NO: 14840 - RNA, 22 nt, synthetic construct
  misc_feature 1..22: note = HBV-targeting guide sequence portion
  source 1..22: mol_type = other RNA
cccaccgcacggaggccttttg

SEQ ID NO: 14841 - RNA, 22 nt, synthetic construct
  misc_feature 1..22: note = HBV-targeting guide sequence portion
  source 1..22: mol_type = other RNA
cccaccttatgagtccaaggga

SEQ ID NO: 14842 - RNA, 22 nt, synthetic construct
  misc_feature 1..22: note = HBV-targeting guide sequence portion
  source 1..22: mol_type = other RNA
cccactcccataggaattttcc

SEQ ID NO: 14843 - RNA, 22 nt, synthetic construct
  misc_feature 1..22: note = HBV-targeting guide sequence portion
  source 1..22: mol_type = other RNA
cccactggttggggcttggtca

SEQ ID NO: 14844 - RNA, 22 nt, synthetic construct
  misc_feature 1..22: note = HBV-targeting guide sequence portion
  source 1..22: mol_type = other RNA
cccactgtttggctttcagtta

SEQ ID NO: 14845 - RNA, 22 nt, synthetic construct
  misc_feature 1..22: note = HBV-targeting guide sequence portion
  source 1..22: mol_type = other RNA
cccagaagacccacaattcgtt

SEQ ID NO: 14846 - RNA, 22 nt, synthetic construct
  misc_feature 1..22: note = HBV-targeting guide sequence portion
  source 1..22: mol_type = other RNA
cccagaggattgctggtggaaa

SEQ ID NO: 14847 - RNA, 22 nt, synthetic construct
  misc_feature 1..22: note = HBV-targeting guide sequence portion
  source 1..22: mol_type = other RNA
cccagagtgagaggcctgtatc

SEQ ID NO: 14848 - RNA, 22 nt, synthetic construct
  misc_feature 1..22: note = HBV-targeting guide sequence portion
  source 1..22: mol_type = other RNA
cccagcaaagaattgcttgcct

SEQ ID NO: 14849 - RNA, 22 nt, synthetic construct
  misc_feature 1..22: note = HBV-targeting guide sequence portion
  source 1..22: mol_type = other RNA
cccagccttcagagcaaactcc

SEQ ID NO: 14850 - RNA, 22 nt, synthetic construct
  misc_feature 1..22: note = HBV-targeting guide sequence portion
  source 1..22: mol_type = other RNA
cccaggatgatgggatgggaat

SEQ ID NO: 14851 - RNA, 22 nt, synthetic construct
  misc_feature 1..22: note = HBV-targeting guide sequence portion
  source 1..22: mol_type = other RNA
cccaggtagctagagtcattag

SEQ ID NO: 14852 - RNA, 22 nt, synthetic construct
  misc_feature 1..22: note = HBV-targeting guide sequence portion
  source 1..22: mol_type = other RNA
cccagtctttaaacaaacagtc

SEQ ID NO: 14853 - RNA, 22 nt, synthetic construct
  misc_feature 1..22: note = HBV-targeting guide sequence portion
  source 1..22: mol_type = other RNA
cccataggaattttccgaaagc

SEQ ID NO: 14854 - RNA, 22 nt, synthetic construct
  misc_feature 1..22: note = HBV-targeting guide sequence portion
  source 1..22: mol_type = other RNA
cccatataaagaatttggagct

SEQ ID NO: 14855 - RNA, 22 nt, synthetic construct
  misc_feature 1..22: note = HBV-targeting guide sequence portion
  source 1..22: mol_type = other RNA
cccatatgagtgttgacataac

SEQ ID NO: 14856 - RNA, 22 nt, synthetic construct
  misc_feature 1..22: note = HBV-targeting guide sequence portion
  source 1..22: mol_type = other RNA
cccatcatcctgggctttcgga

SEQ ID NO: 14857 - RNA, 22 nt, synthetic construct
  misc_feature 1..22: note = HBV-targeting guide sequence portion
  source 1..22: mol_type = other RNA
cccatcccatcatcctgggctt

SEQ ID NO: 14858 - RNA, 22 nt, synthetic construct
  misc_feature 1..22: note = HBV-targeting guide sequence portion
  source 1..22: mol_type = other RNA
cccatctcgaggccgcttgggg

SEQ ID NO: 14859 - RNA, 22 nt, synthetic construct
  misc_feature 1..22: note = HBV-targeting guide sequence portion
  source 1..22: mol_type = other RNA
cccatctctttgttttgttagg

SEQ ID NO: 14860 - RNA, 22 nt, synthetic construct
  misc_feature 1..22: note = HBV-targeting guide sequence portion
  source 1..22: mol_type = other RNA
cccatgaaattaagagaataac

SEQ ID NO: 14861 - RNA, 22 nt, synthetic construct
  misc_feature 1..22: note = HBV-targeting guide sequence portion
  source 1..22: mol_type = other RNA
cccatgctgtagctcttgttcc

SEQ ID NO: 14862 - RNA, 22 nt, synthetic construct
  misc_feature 1..22: note = HBV-targeting guide sequence portion
  source 1..22: mol_type = other RNA
cccatggctgctaggctgtgct

SEQ ID NO: 14863 - RNA, 22 nt, synthetic construct
  misc_feature 1..22: note = HBV-targeting guide sequence portion
  source 1..22: mol_type = other RNA
ccccaaaaggcctccgtgcggt

SEQ ID NO: 14864 - RNA, 22 nt, synthetic construct
  misc_feature 1..22: note = HBV-targeting guide sequence portion
  source 1..22: mol_type = other RNA
ccccaacaatcaatgacatagc

SEQ ID NO: 14865 - RNA, 22 nt, synthetic construct
  misc_feature 1..22: note = HBV-targeting guide sequence portion
  source 1..22: mol_type = other RNA
ccccaaccagtgggggttgcat

SEQ ID NO: 14866 - RNA, 22 nt, synthetic construct
  misc_feature 1..22: note = HBV-targeting guide sequence portion
  source 1..22: mol_type = other RNA
ccccaacctccaatcactcacc

SEQ ID NO: 14867 - RNA, 22 nt, synthetic construct
  misc_feature 1..22: note = HBV-targeting guide sequence portion
  source 1..22: mol_type = other RNA
ccccaactcctcccagtcttta

SEQ ID NO: 14868 - RNA, 22 nt, synthetic construct
  misc_feature 1..22: note = HBV-targeting guide sequence portion
  source 1..22: mol_type = other RNA
ccccaagcggcctcgagatggg

SEQ ID NO: 14869 - RNA, 22 nt, synthetic construct
  misc_feature 1..22: note = HBV-targeting guide sequence portion
  source 1..22: mol_type = other RNA
ccccaataccacatcatccata

SEQ ID NO: 14870 - RNA, 22 nt, synthetic construct
  misc_feature 1..22: note = HBV-targeting guide sequence portion
  source 1..22: mol_type = other RNA
ccccaatcctcgagaagattga

SEQ ID NO: 14871 - RNA, 22 nt, synthetic construct
  misc_feature 1..22: note = HBV-targeting guide sequence portion
  source 1..22: mol_type = other RNA
ccccaccgcacggaggcctttt

SEQ ID NO: 14872 - RNA, 22 nt, synthetic construct
  misc_feature 1..22: note = HBV-targeting guide sequence portion
  source 1..22: mol_type = other RNA
ccccactggttggggcttggtc

SEQ ID NO: 14873 - RNA, 22 nt, synthetic construct
  misc_feature 1..22: note = HBV-targeting guide sequence portion
  source 1..22: mol_type = other RNA
ccccactgtttggctttcagtt

SEQ ID NO: 14874 - RNA, 22 nt, synthetic construct
  misc_feature 1..22: note = HBV-targeting guide sequence portion
  source 1..22: mol_type = other RNA
ccccagcaaagaattgcttgcc

SEQ ID NO: 14875 - RNA, 22 nt, synthetic construct
  misc_feature 1..22: note = HBV-targeting guide sequence portion
  source 1..22: mol_type = other RNA
ccccatctctttgttttgttag

SEQ ID NO: 14876 - RNA, 22 nt, synthetic construct
  misc_feature 1..22: note = HBV-targeting guide sequence portion
  source 1..22: mol_type = other RNA
ccccatgctgtagctcttgttc

SEQ ID NO: 14877 - RNA, 22 nt, synthetic construct
  misc_feature 1..22: note = HBV-targeting guide sequence portion
  source 1..22: mol_type = other RNA
cccccaactcctcccagtcttt

SEQ ID NO: 14878 - RNA, 22 nt, synthetic construct
  misc_feature 1..22: note = HBV-targeting guide sequence portion
  source 1..22: mol_type = other RNA
cccccaataccacatcatccat

SEQ ID NO: 14879 - RNA, 22 nt, synthetic construct
  misc_feature 1..22: note = HBV-targeting guide sequence portion
  source 1..22: mol_type = other RNA
cccccactggttggggcttggt

SEQ ID NO: 14880 - RNA, 22 nt, synthetic construct
  misc_feature 1..22: note = HBV-targeting guide sequence portion
  source 1..22: mol_type = other RNA
cccccactgtttggctttcagt

SEQ ID NO: 14881 - RNA, 22 nt, synthetic construct
  misc_feature 1..22: note = HBV-targeting guide sequence portion
  source 1..22: mol_type = other RNA
ccccctagaaaattgagagaag

SEQ ID NO: 14882 - RNA, 22 nt, synthetic construct
  misc_feature 1..22: note = HBV-targeting guide sequence portion
  source 1..22: mol_type = other RNA
ccccgagattgagatcttctgc

SEQ ID NO: 14883 - RNA, 22 nt, synthetic construct
  misc_feature 1..22: note = HBV-targeting guide sequence portion
  source 1..22: mol_type = other RNA
ccccgcctgtaacacgagcagg

SEQ ID NO: 14884 - RNA, 22 nt, synthetic construct
  misc_feature 1..22: note = HBV-targeting guide sequence portion
  source 1..22: mol_type = other RNA
ccccgctgtctccacctctgag

SEQ ID NO: 14885 - RNA, 22 nt, synthetic construct
  misc_feature 1..22: note = HBV-targeting guide sequence portion
  source 1..22: mol_type = other RNA
ccccgtaaaatttcccacctta

SEQ ID NO: 14886 - RNA, 22 nt, synthetic construct
  misc_feature 1..22: note = HBV-targeting guide sequence portion
  source 1..22: mol_type = other RNA
ccccgtctgtgccttctcatct

SEQ ID NO: 14887 - RNA, 22 nt, synthetic construct
  misc_feature 1..22: note = HBV-targeting guide sequence portion
  source 1..22: mol_type = other RNA
ccccgtggtcggtcggaacggc

SEQ ID NO: 14888 - RNA, 22 nt, synthetic construct
  misc_feature 1..22: note = HBV-targeting guide sequence portion
  source 1..22: mol_type = other RNA
ccccgttgccaggcaacggcca

SEQ ID NO: 14889 - RNA, 22 nt, synthetic construct
  misc_feature 1..22: note = HBV-targeting guide sequence portion
  source 1..22: mol_type = other RNA
cccctagaaaattgagagaagt

SEQ ID NO: 14890 - RNA, 22 nt, synthetic construct
  misc_feature 1..22: note = HBV-targeting guide sequence portion
  source 1..22: mol_type = other RNA
cccctagaagaagaactccctc

SEQ ID NO: 14891 - RNA, 22 nt, synthetic construct
  misc_feature 1..22: note = HBV-targeting guide sequence portion
  source 1..22: mol_type = other RNA
cccctatcctatcaacacttcc

SEQ ID NO: 14892 - RNA, 22 nt, synthetic construct
  misc_feature 1..22: note = HBV-targeting guide sequence portion
  source 1..22: mol_type = other RNA
cccctgctcgtgttacaggcgg

SEQ ID NO: 14893 - RNA, 22 nt, synthetic construct
  misc_feature 1..22: note = HBV-targeting guide sequence portion
  source 1..22: mol_type = other RNA
ccccttttacacaatgtggtta

SEQ ID NO: 14894 - RNA, 22 nt, synthetic construct
  misc_feature 1..22: note = HBV-targeting guide sequence portion
  source 1..22: mol_type = other RNA
cccgaatgctccagctcctacc

SEQ ID NO: 14895 - RNA, 22 nt, synthetic construct
  misc_feature 1..22: note = HBV-targeting guide sequence portion
  source 1..22: mol_type = other RNA
cccgaccaccagttggacccag

SEQ ID NO: 14896 - RNA, 22 nt, synthetic construct
  misc_feature 1..22: note = HBV-targeting guide sequence portion
  source 1..22: mol_type = other RNA
cccgagaatgtttgctccagac

SEQ ID NO: 14897 - RNA, 22 nt, synthetic construct
  misc_feature 1..22: note = HBV-targeting guide sequence portion
  source 1..22: mol_type = other RNA
cccgagattgagatcttctgcg

SEQ ID NO: 14898 - RNA, 22 nt, synthetic construct
  misc_feature 1..22: note = HBV-targeting guide sequence portion
  source 1..22: mol_type = other RNA
cccgatacagagctgcggcggt

SEQ ID NO: 14899 - RNA, 22 nt, synthetic construct
  misc_feature 1..22: note = HBV-targeting guide sequence portion
  source 1..22: mol_type = other RNA
cccgcaaatatacatcgttccc

SEQ ID NO: 14900 - RNA, 22 nt, synthetic construct
  misc_feature 1..22: note = HBV-targeting guide sequence portion
  source 1..22: mol_type = other RNA
cccgcctgtaacacgagcaggg

SEQ ID NO: 14901 - RNA, 22 nt, synthetic construct
  misc_feature 1..22: note = HBV-targeting guide sequence portion
  source 1..22: mol_type = other RNA
cccgccttccatagagtgtgta

SEQ ID NO: 14902 - RNA, 22 nt, synthetic construct
  misc_feature 1..22: note = HBV-targeting guide sequence portion
  source 1..22: mol_type = other RNA
cccgcgcaggatccagttggca

SEQ ID NO: 14903 - RNA, 22 nt, synthetic construct
  misc_feature 1..22: note = HBV-targeting guide sequence portion
  source 1..22: mol_type = other RNA
cccgcggacgacccatctcgag

SEQ ID NO: 14904 - RNA, 22 nt, synthetic construct
  misc_feature 1..22: note = HBV-targeting guide sequence portion
  source 1..22: mol_type = other RNA
cccgctgtctccacctctgaga

SEQ ID NO: 14905 - RNA, 22 nt, synthetic construct
  misc_feature 1..22: note = HBV-targeting guide sequence portion
  source 1..22: mol_type = other RNA
cccgcttacagttaatgagaaa

SEQ ID NO: 14906 - RNA, 22 nt, synthetic construct
  misc_feature 1..22: note = HBV-targeting guide sequence portion
  source 1..22: mol_type = other RNA
cccggttaacaggcctattgat

SEQ ID NO: 14907 - RNA, 22 nt, synthetic construct
  misc_feature 1..22: note = HBV-targeting guide sequence portion
  source 1..22: mol_type = other RNA
cccgtaaaatttcccaccttat

SEQ ID NO: 14908 - RNA, 22 nt, synthetic construct
  misc_feature 1..22: note = HBV-targeting guide sequence portion
  source 1..22: mol_type = other RNA
cccgtcggcgctgaatcccgcg

SEQ ID NO: 14909 - RNA, 22 nt, synthetic construct
  misc_feature 1..22: note = HBV-targeting guide sequence portion
  source 1..22: mol_type = other RNA
cccgtctgtcctctaattccag

SEQ ID NO: 14910 - RNA, 22 nt, synthetic construct
  misc_feature 1..22: note = HBV-targeting guide sequence portion
  source 1..22: mol_type = other RNA
cccgtctgtgccttctcatctg

SEQ ID NO: 14911 - RNA, 22 nt, synthetic construct
  misc_feature 1..22: note = HBV-targeting guide sequence portion
  source 1..22: mol_type = other RNA
cccgtgctggtggttgatgatc

SEQ ID NO: 14912 - RNA, 22 nt, synthetic construct
  misc_feature 1..22: note = HBV-targeting guide sequence portion
  source 1..22: mol_type = other RNA
cccgtggtcggtcggaacggca

SEQ ID NO: 14913 - RNA, 22 nt, synthetic construct
  misc_feature 1..22: note = HBV-targeting guide sequence portion
  source 1..22: mol_type = other RNA
cccgttgccaggcaacggccag

SEQ ID NO: 14914 - RNA, 22 nt, synthetic construct
  misc_feature 1..22: note = HBV-targeting guide sequence portion
  source 1..22: mol_type = other RNA
cccgtttctcttggctcagttt

SEQ ID NO: 14915 - RNA, 22 nt, synthetic construct
  misc_feature 1..22: note = HBV-targeting guide sequence portion
  source 1..22: mol_type = other RNA
ccctaaagccacccaaggcaca

SEQ ID NO: 14916 - RNA, 22 nt, synthetic construct
  misc_feature 1..22: note = HBV-targeting guide sequence portion
  source 1..22: mol_type = other RNA
ccctaacaaaacaaagagatgg

SEQ ID NO: 14917 - RNA, 22 nt, synthetic construct
  misc_feature 1..22: note = HBV-targeting guide sequence portion
  source 1..22: mol_type = other RNA
ccctacgaaccactgaacaaat

SEQ ID NO: 14918 - RNA, 22 nt, synthetic construct
  misc_feature 1..22: note = HBV-targeting guide sequence portion
  source 1..22: mol_type = other RNA
ccctagaaaattgagagaagtc

SEQ ID NO: 14919 - RNA, 22 nt, synthetic construct
  misc_feature 1..22: note = HBV-targeting guide sequence portion
  source 1..22: mol_type = other RNA
ccctagaagaagaactccctcg

SEQ ID NO: 14920 - RNA, 22 nt, synthetic construct
  misc_feature 1..22: note = HBV-targeting guide sequence portion
  source 1..22: mol_type = other RNA
ccctagatgcttgatcttctaa

SEQ ID NO: 14921 - RNA, 22 nt, synthetic construct
  misc_feature 1..22: note = HBV-targeting guide sequence portion
  source 1..22: mol_type = other RNA
ccctagcccgaatgctccagct

SEQ ID NO: 14922 - RNA, 22 nt, synthetic construct
  misc_feature 1..22: note = HBV-targeting guide sequence portion
  source 1..22: mol_type = other RNA
ccctatcctatcaacacttccg

SEQ ID NO: 14923 - RNA, 22 nt, synthetic construct
  misc_feature 1..22: note = HBV-targeting guide sequence portion
  source 1..22: mol_type = other RNA
ccctcaggctcagggcataatg

SEQ ID NO: 14924 - RNA, 22 nt, synthetic construct
  misc_feature 1..22: note = HBV-targeting guide sequence portion
  source 1..22: mol_type = other RNA
ccctcattggaaaacaccctct

SEQ ID NO: 14925 - RNA, 22 nt, synthetic construct
  misc_feature 1..22: note = HBV-targeting guide sequence portion
  source 1..22: mol_type = other RNA
ccctcctgttgctgtacaaaac

SEQ ID NO: 14926 - RNA, 22 nt, synthetic construct
  misc_feature 1..22: note = HBV-targeting guide sequence portion
  source 1..22: mol_type = other RNA
ccctcgcctcgcagacgaagat

SEQ ID NO: 14927 - RNA, 22 nt, synthetic construct
  misc_feature 1..22: note = HBV-targeting guide sequence portion
  source 1..22: mol_type = other RNA
ccctcttttcctaatatacatc

SEQ ID NO: 14928 - RNA, 22 nt, synthetic construct
  misc_feature 1..22: note = HBV-targeting guide sequence portion
  source 1..22: mol_type = other RNA
ccctgagcctgagggctccacc

SEQ ID NO: 14929 - RNA, 22 nt, synthetic construct
  misc_feature 1..22: note = HBV-targeting guide sequence portion
  source 1..22: mol_type = other RNA
ccctgcagaacctgcacgactc

SEQ ID NO: 14930 - RNA, 22 nt, synthetic construct
  misc_feature 1..22: note = HBV-targeting guide sequence portion
  source 1..22: mol_type = other RNA
ccctgcgctgaacatggagaac

SEQ ID NO: 14931 - RNA, 22 nt, synthetic construct
  misc_feature 1..22: note = HBV-targeting guide sequence portion
  source 1..22: mol_type = other RNA
ccctgctcgtgttacaggcggg

SEQ ID NO: 14932 - RNA, 22 nt, synthetic construct
  misc_feature 1..22: note = HBV-targeting guide sequence portion
  source 1..22: mol_type = other RNA
ccctgctggtggctccagttca

SEQ ID NO: 14933 - RNA, 22 nt, synthetic construct
  misc_feature 1..22: note = HBV-targeting guide sequence portion
  source 1..22: mol_type = other RNA
ccctggccagacgccaacaagg

SEQ ID NO: 14934 - RNA, 22 nt, synthetic construct
  misc_feature 1..22: note = HBV-targeting guide sequence portion
  source 1..22: mol_type = other RNA
ccctgtcgtcctcttctctgcc

SEQ ID NO: 14935 - RNA, 22 nt, synthetic construct
  misc_feature 1..22: note = HBV-targeting guide sequence portion
  source 1..22: mol_type = other RNA
ccctgttccgactactgcctct

SEQ ID NO: 14936 - RNA, 22 nt, synthetic construct
  misc_feature 1..22: note = HBV-targeting guide sequence portion
  source 1..22: mol_type = other RNA
cccttatccaagggcaagtatt

SEQ ID NO: 14937 - RNA, 22 nt, synthetic construct
  misc_feature 1..22: note = HBV-targeting guide sequence portion
  source 1..22: mol_type = other RNA
cccttggactcataaggtggga

SEQ ID NO: 14938 - RNA, 22 nt, synthetic construct
  misc_feature 1..22: note = HBV-targeting guide sequence portion
  source 1..22: mol_type = other RNA
cccttggataagggtattaaac

SEQ ID NO: 14939 - RNA, 22 nt, synthetic construct
  misc_feature 1..22: note = HBV-targeting guide sequence portion
  source 1..22: mol_type = other RNA
cccttgtatgcatgtattcaat

SEQ ID NO: 14940 - RNA, 22 nt, synthetic construct
  misc_feature 1..22: note = HBV-targeting guide sequence portion
  source 1..22: mol_type = other RNA
ccctttataccgctgttaccaa

SEQ ID NO: 14941 - RNA, 22 nt, synthetic construct
  misc_feature 1..22: note = HBV-targeting guide sequence portion
  source 1..22: mol_type = other RNA
cccttttacacaatgtggttat

SEQ ID NO: 14942 - RNA, 22 nt, synthetic construct
  misc_feature 1..22: note = HBV-targeting guide sequence portion
  source 1..22: mol_type = other RNA
ccgaaagcccaggatgatggga

SEQ ID NO: 14943 - RNA, 22 nt, synthetic construct
  misc_feature 1..22: note = HBV-targeting guide sequence portion
  source 1..22: mol_type = other RNA
ccgaaggttttgtacagcaaca

SEQ ID NO: 14944 - RNA, 22 nt, synthetic construct
  misc_feature 1..22: note = HBV-targeting guide sequence portion
  source 1..22: mol_type = other RNA
ccgaatgctccagctcctacct

SEQ ID NO: 14945 - RNA, 22 nt, synthetic construct
  misc_feature 1..22: note = HBV-targeting guide sequence portion
  source 1..22: mol_type = other RNA
ccgaccaccagttggacccagc

SEQ ID NO: 14946 - RNA, 22 nt, synthetic construct
  misc_feature 1..22: note = HBV-targeting guide sequence portion
  source 1..22: mol_type = other RNA
ccgaccacggggcgcacctctc

SEQ ID NO: 14947 - RNA, 22 nt, synthetic construct
  misc_feature 1..22: note = HBV-targeting guide sequence portion
  source 1..22: mol_type = other RNA
ccgaccgaccacggggcgcacc

SEQ ID NO: 14948 - RNA, 22 nt, synthetic construct
  misc_feature 1..22: note = HBV-targeting guide sequence portion
  source 1..22: mol_type = other RNA
ccgaccttgaggcatacttcaa

SEQ ID NO: 14949 - RNA, 22 nt, synthetic construct
  misc_feature 1..22: note = HBV-targeting guide sequence portion
  source 1..22: mol_type = other RNA
ccgacgggacgtaaacaaagga

SEQ ID NO: 14950 - RNA, 22 nt, synthetic construct
  misc_feature 1..22: note = HBV-targeting guide sequence portion
  source 1..22: mol_type = other RNA
ccgactactgcctctcacatat

SEQ ID NO: 14951 - RNA, 22 nt, synthetic construct
  misc_feature 1..22: note = HBV-targeting guide sequence portion
  source 1..22: mol_type = other RNA
ccgagaatgtttgctccagacc

SEQ ID NO: 14952 - RNA, 22 nt, synthetic construct
  misc_feature 1..22: note = HBV-targeting guide sequence portion
  source 1..22: mol_type = other RNA
ccgagattgagatcttctgcga

SEQ ID NO: 14953 - RNA, 22 nt, synthetic construct
  misc_feature 1..22: note = HBV-targeting guide sequence portion
  source 1..22: mol_type = other RNA
ccgatacagagctgcggcggta

SEQ ID NO: 14954 - RNA, 22 nt, synthetic construct
  misc_feature 1..22: note = HBV-targeting guide sequence portion
  source 1..22: mol_type = other RNA
ccgatccatactgcggaactcc

SEQ ID NO: 14955 - RNA, 22 nt, synthetic construct
  misc_feature 1..22: note = HBV-targeting guide sequence portion
  source 1..22: mol_type = other RNA
ccgcaaatatacatcgttccca

SEQ ID NO: 14956 - RNA, 22 nt, synthetic construct
  misc_feature 1..22: note = HBV-targeting guide sequence portion
  source 1..22: mol_type = other RNA
ccgcacggaggccttttggggt

SEQ ID NO: 14957 - RNA, 22 nt, synthetic construct
  misc_feature 1..22: note = HBV-targeting guide sequence portion
  source 1..22: mol_type = other RNA
ccgcagacacatccagcgataa

SEQ ID NO: 14958 - RNA, 22 nt, synthetic construct
  misc_feature 1..22: note = HBV-targeting guide sequence portion
  source 1..22: mol_type = other RNA
ccgcagagtctagactcgtggt

SEQ ID NO: 14959 - RNA, 22 nt, synthetic construct
  misc_feature 1..22: note = HBV-targeting guide sequence portion
  source 1..22: mol_type = other RNA
ccgcagctctgtatcgggatgc

SEQ ID NO: 14960 - RNA, 22 nt, synthetic construct
  misc_feature 1..22: note = HBV-targeting guide sequence portion
  source 1..22: mol_type = other RNA
ccgcagtatggatcggcagagg

SEQ ID NO: 14961 - RNA, 22 nt, synthetic construct
  misc_feature 1..22: note = HBV-targeting guide sequence portion
  source 1..22: mol_type = other RNA
ccgccgcagctctgtatcggga

SEQ ID NO: 14962 - RNA, 22 nt, synthetic construct
  misc_feature 1..22: note = HBV-targeting guide sequence portion
  source 1..22: mol_type = other RNA
ccgcctcctgcctctaccaatc

SEQ ID NO: 14963 - RNA, 22 nt, synthetic construct
  misc_feature 1..22: note = HBV-targeting guide sequence portion
  source 1..22: mol_type = other RNA
ccgcctgtaacacgagcagggg

SEQ ID NO: 14964 - RNA, 22 nt, synthetic construct
  misc_feature 1..22: note = HBV-targeting guide sequence portion
  source 1..22: mol_type = other RNA
ccgccttccatagagtgtgtaa

SEQ ID NO: 14965 - RNA, 22 nt, synthetic construct
  misc_feature 1..22: note = HBV-targeting guide sequence portion
  source 1..22: mol_type = other RNA
ccgcgcaggatccagttggcag

SEQ ID NO: 14966 - RNA, 22 nt, synthetic construct
  misc_feature 1..22: note = HBV-targeting guide sequence portion
  source 1..22: mol_type = other RNA
ccgcggacgacccatctcgagg

SEQ ID NO: 14967 - RNA, 22 nt, synthetic construct
  misc_feature 1..22: note = HBV-targeting guide sequence portion
  source 1..22: mol_type = other RNA
ccgcgggattcagcgccgacgg

SEQ ID NO: 14968 - RNA, 22 nt, synthetic construct
  misc_feature 1..22: note = HBV-targeting guide sequence portion
  source 1..22: mol_type = other RNA
ccgcgtaaagagaggtgcgccc

SEQ ID NO: 14969 - RNA, 22 nt, synthetic construct
  misc_feature 1..22: note = HBV-targeting guide sequence portion
  source 1..22: mol_type = other RNA
ccgcgtcgcagaagatctcaat

SEQ ID NO: 14970 - RNA, 22 nt, synthetic construct
  misc_feature 1..22: note = HBV-targeting guide sequence portion
  source 1..22: mol_type = other RNA
ccgctgtctccacctctgagaa

SEQ ID NO: 14971 - RNA, 22 nt, synthetic construct
  misc_feature 1..22: note = HBV-targeting guide sequence portion
  source 1..22: mol_type = other RNA
ccgctgttaccaattttctttt

SEQ ID NO: 14972 - RNA, 22 nt, synthetic construct
  misc_feature 1..22: note = HBV-targeting guide sequence portion
  source 1..22: mol_type = other RNA
ccgcttacagttaatgagaaaa

SEQ ID NO: 14973 - RNA, 22 nt, synthetic construct
  misc_feature 1..22: note = HBV-targeting guide sequence portion
  source 1..22: mol_type = other RNA
ccgcttggggccctgtcgtcct

SEQ ID NO: 14974 - RNA, 22 nt, synthetic construct
  misc_feature 1..22: note = HBV-targeting guide sequence portion
  source 1..22: mol_type = other RNA
ccgcttgttttgctcgcagccg

SEQ ID NO: 14975 - RNA, 22 nt, synthetic construct
  misc_feature 1..22: note = HBV-targeting guide sequence portion
  source 1..22: mol_type = other RNA
ccggaaaggttccacgcatgcg

SEQ ID NO: 14976 - RNA, 22 nt, synthetic construct
  misc_feature 1..22: note = HBV-targeting guide sequence portion
  source 1..22: mol_type = other RNA
ccggaagtgttgataggatagg

SEQ ID NO: 14977 - RNA, 22 nt, synthetic construct
  misc_feature 1..22: note = HBV-targeting guide sequence portion
  source 1..22: mol_type = other RNA
ccggaccgtgtgcacttcgctt

SEQ ID NO: 14978 - RNA, 22 nt, synthetic construct
  misc_feature 1..22: note = HBV-targeting guide sequence portion
  source 1..22: mol_type = other RNA
ccggagacttgtgttgttagac

SEQ ID NO: 14979 - RNA, 22 nt, synthetic construct
  misc_feature 1..22: note = HBV-targeting guide sequence portion
  source 1..22: mol_type = other RNA
ccggcagatgagaaggcacaga

SEQ ID NO: 14980 - RNA, 22 nt, synthetic construct
  misc_feature 1..22: note = HBV-targeting guide sequence portion
  source 1..22: mol_type = other RNA
ccggctcctctgccgatccata

SEQ ID NO: 14981 - RNA, 22 nt, synthetic construct
  misc_feature 1..22: note = HBV-targeting guide sequence portion
  source 1..22: mol_type = other RNA
ccggctgcgagcaaaacaagcg

SEQ ID NO: 14982 - RNA, 22 nt, synthetic construct
  misc_feature 1..22: note = HBV-targeting guide sequence portion
  source 1..22: mol_type = other RNA
ccgggagttttctgaaacattc

SEQ ID NO: 14983 - RNA, 22 nt, synthetic construct
  misc_feature 1..22: note = HBV-targeting guide sequence portion
  source 1..22: mol_type = other RNA
ccggtctggagcaaacattctc

SEQ ID NO: 14984 - RNA, 22 nt, synthetic construct
  misc_feature 1..22: note = HBV-targeting guide sequence portion
  source 1..22: mol_type = other RNA
ccggttaacaggcctattgatt

SEQ ID NO: 14985 - RNA, 22 nt, synthetic construct
  misc_feature 1..22: note = HBV-targeting guide sequence portion
  source 1..22: mol_type = other RNA
ccgtaaaatttcccaccttatg

SEQ ID NO: 14986 - RNA, 22 nt, synthetic construct
  misc_feature 1..22: note = HBV-targeting guide sequence portion
  source 1..22: mol_type = other RNA
ccgtacgagatcttctagatac

SEQ ID NO: 14987 - RNA, 22 nt, synthetic construct
  misc_feature 1..22: note = HBV-targeting guide sequence portion
  source 1..22: mol_type = other RNA
ccgtcctgactggcgattggta

SEQ ID NO: 14988 - RNA, 22 nt, synthetic construct
  misc_feature 1..22: note = HBV-targeting guide sequence portion
  source 1..22: mol_type = other RNA
ccgtcggcgctgaatcccgcgg

SEQ ID NO: 14989 - RNA, 22 nt, synthetic construct
  misc_feature 1..22: note = HBV-targeting guide sequence portion
  source 1..22: mol_type = other RNA
ccgtctgtcctctaattccagg

SEQ ID NO: 14990 - RNA, 22 nt, synthetic construct
  misc_feature 1..22: note = HBV-targeting guide sequence portion
  source 1..22: mol_type = other RNA
ccgtctgtgccttctcatctgc

SEQ ID NO: 14991 - RNA, 22 nt, synthetic construct
  misc_feature 1..22: note = HBV-targeting guide sequence portion
  source 1..22: mol_type = other RNA
ccgtcttttctcattaactgta

SEQ ID NO: 14992 - RNA, 22 nt, synthetic construct
  misc_feature 1..22: note = HBV-targeting guide sequence portion
  source 1..22: mol_type = other RNA
ccgtgaacgcccaccaattctt

SEQ ID NO: 14993 - RNA, 22 nt, synthetic construct
  misc_feature 1..22: note = HBV-targeting guide sequence portion
  source 1..22: mol_type = other RNA
ccgtgcggtggggtgaacccta

SEQ ID NO: 14994 - RNA, 22 nt, synthetic construct
  misc_feature 1..22: note = HBV-targeting guide sequence portion
  source 1..22: mol_type = other RNA
ccgtgctggtggttgatgatcc

SEQ ID NO: 14995 - RNA, 22 nt, synthetic construct
  misc_feature 1..22: note = HBV-targeting guide sequence portion
  source 1..22: mol_type = other RNA
ccgtggtcggtcggaacggcag

SEQ ID NO: 14996 - RNA, 22 nt, synthetic construct
  misc_feature 1..22: note = HBV-targeting guide sequence portion
  source 1..22: mol_type = other RNA
ccgtgtgcacttcgcttcacct

SEQ ID NO: 14997 - RNA, 22 nt, synthetic construct
  misc_feature 1..22: note = HBV-targeting guide sequence portion
  source 1..22: mol_type = other RNA
ccgtgtgtcttggccaaaattc

SEQ ID NO: 14998 - RNA, 22 nt, synthetic construct
  misc_feature 1..22: note = HBV-targeting guide sequence portion
  source 1..22: mol_type = other RNA
ccgttccgaccgaccacggggc

SEQ ID NO: 14999 - RNA, 22 nt, synthetic construct
  misc_feature 1..22: note = HBV-targeting guide sequence portion
  source 1..22: mol_type = other RNA
ccgttgccaggcaacggccagg

SEQ ID NO: 15000 - RNA, 22 nt, synthetic construct
  misc_feature 1..22: note = HBV-targeting guide sequence portion
  source 1..22: mol_type = other RNA
ccgttgcctggcaacggggtaa

SEQ ID NO: 15001 - RNA, 22 nt, synthetic construct
  misc_feature 1..22: note = HBV-targeting guide sequence portion
  source 1..22: mol_type = other RNA
ccgtttctcttccaaaagtaag

SEQ ID NO: 15002 - RNA, 22 nt, synthetic construct
  misc_feature 1..22: note = HBV-targeting guide sequence portion
  source 1..22: mol_type = other RNA
ccgtttctcttggctcagttta

SEQ ID NO: 15003 - RNA, 22 nt, synthetic construct
  misc_feature 1..22: note = HBV-targeting guide sequence portion
  source 1..22: mol_type = other RNA
cctaaagccacccaaggcacag

SEQ ID NO: 15004 - RNA, 22 nt, synthetic construct
  misc_feature 1..22: note = HBV-targeting guide sequence portion
  source 1..22: mol_type = other RNA
cctaaagttcagacaactattg

SEQ ID NO: 15005 - RNA, 22 nt, synthetic construct
  misc_feature 1..22: note = HBV-targeting guide sequence portion
  source 1..22: mol_type = other RNA
cctaaattcaccaaatacttgc

SEQ ID NO: 15006 - RNA, 22 nt, synthetic construct
  misc_feature 1..22: note = HBV-targeting guide sequence portion
  source 1..22: mol_type = other RNA
cctaacaaaacaaagagatggg

SEQ ID NO: 15007 - RNA, 22 nt, synthetic construct
  misc_feature 1..22: note = HBV-targeting guide sequence portion
  source 1..22: mol_type = other RNA
cctaatatacatctacaccaag

SEQ ID NO: 15008 - RNA, 22 nt, synthetic construct
  misc_feature 1..22: note = HBV-targeting guide sequence portion
  source 1..22: mol_type = other RNA
cctaatcatctcttgttcatgt

SEQ ID NO: 15009 - RNA, 22 nt, synthetic construct
  misc_feature 1..22: note = HBV-targeting guide sequence portion
  source 1..22: mol_type = other RNA
cctacaaactgttcacattttt

SEQ ID NO: 15010 - RNA, 22 nt, synthetic construct
  misc_feature 1..22: note = HBV-targeting guide sequence portion
  source 1..22: mol_type = other RNA
cctacagcctcctagtacaaag

SEQ ID NO: 15011 - RNA, 22 nt, synthetic construct
  misc_feature 1..22: note = HBV-targeting guide sequence portion
  source 1..22: mol_type = other RNA
cctaccccgctgtctccacctc

SEQ ID NO: 15012 - RNA, 22 nt, synthetic construct
  misc_feature 1..22: note = HBV-targeting guide sequence portion
  source 1..22: mol_type = other RNA
cctaccttgttggcgtctggcc

SEQ ID NO: 15013 - RNA, 22 nt, synthetic construct
  misc_feature 1..22: note = HBV-targeting guide sequence portion
  source 1..22: mol_type = other RNA
cctacgaaccactgaacaaatg

SEQ ID NO: 15014 - RNA, 22 nt, synthetic construct
  misc_feature 1..22: note = HBV-targeting guide sequence portion
  source 1..22: mol_type = other RNA
cctactgttcaagcctccaagc

SEQ ID NO: 15015 - RNA, 22 nt, synthetic construct
  misc_feature 1..22: note = HBV-targeting guide sequence portion
  source 1..22: mol_type = other RNA
cctagaaaattgagagaagtcc

SEQ ID NO: 15016 - RNA, 22 nt, synthetic construct
  misc_feature 1..22: note = HBV-targeting guide sequence portion
  source 1..22: mol_type = other RNA
cctagaagaagaactccctcgc

SEQ ID NO: 15017 - RNA, 22 nt, synthetic construct
  misc_feature 1..22: note = HBV-targeting guide sequence portion
  source 1..22: mol_type = other RNA
cctagagtatttggtgtctttt

SEQ ID NO: 15018 - RNA, 22 nt, synthetic construct
  misc_feature 1..22: note = HBV-targeting guide sequence portion
  source 1..22: mol_type = other RNA
cctagatgcttgatcttctaaa

SEQ ID NO: 15019 - RNA, 22 nt, synthetic construct
  misc_feature 1..22: note = HBV-targeting guide sequence portion
  source 1..22: mol_type = other RNA
cctagcagccatgggaacgatg

SEQ ID NO: 15020 - RNA, 22 nt, synthetic construct
  misc_feature 1..22: note = HBV-targeting guide sequence portion
  source 1..22: mol_type = other RNA
cctagcaggcataatcaatttc

SEQ ID NO: 15021 - RNA, 22 nt, synthetic construct
  misc_feature 1..22: note = HBV-targeting guide sequence portion
  source 1..22: mol_type = other RNA
cctagcccgaatgctccagctc

SEQ ID NO: 15022 - RNA, 22 nt, synthetic construct
  misc_feature 1..22: note = HBV-targeting guide sequence portion
  source 1..22: mol_type = other RNA
cctagccgcttgttttgctcgc

SEQ ID NO: 15023 - RNA, 22 nt, synthetic construct
  misc_feature 1..22: note = HBV-targeting guide sequence portion
  source 1..22: mol_type = other RNA
cctaggaatcctgatgtgatgt

SEQ ID NO: 15024 - RNA, 22 nt, synthetic construct
  misc_feature 1..22: note = HBV-targeting guide sequence portion
  source 1..22: mol_type = other RNA
cctaggacccctgctcgtgtta

SEQ ID NO: 15025 - RNA, 22 nt, synthetic construct
  misc_feature 1..22: note = HBV-targeting guide sequence portion
  source 1..22: mol_type = other RNA
cctagtacaaagatcattaatc

SEQ ID NO: 15026 - RNA, 22 nt, synthetic construct
  misc_feature 1..22: note = HBV-targeting guide sequence portion
  source 1..22: mol_type = other RNA
cctagtagtcagttatgtcaac

SEQ ID NO: 15027 - RNA, 22 nt, synthetic construct
  misc_feature 1..22: note = HBV-targeting guide sequence portion
  source 1..22: mol_type = other RNA
cctatcaacacttccggagact

SEQ ID NO: 15028 - RNA, 22 nt, synthetic construct
  misc_feature 1..22: note = HBV-targeting guide sequence portion
  source 1..22: mol_type = other RNA
cctatcctatcaacacttccgg

SEQ ID NO: 15029 - RNA, 22 nt, synthetic construct
  misc_feature 1..22: note = HBV-targeting guide sequence portion
  source 1..22: mol_type = other RNA
cctatgaccaagccccaaccag

SEQ ID NO: 15030 - RNA, 22 nt, synthetic construct
  misc_feature 1..22: note = HBV-targeting guide sequence portion
  source 1..22: mol_type = other RNA
cctatgggagtgggcctcagcc

SEQ ID NO: 15031 - RNA, 22 nt, synthetic construct
  misc_feature 1..22: note = HBV-targeting guide sequence portion
  source 1..22: mol_type = other RNA
cctattgattggaaagtgtgtc

SEQ ID NO: 15032 - RNA, 22 nt, synthetic construct
  misc_feature 1..22: note = HBV-targeting guide sequence portion
  source 1..22: mol_type = other RNA
cctcaaggtcggtcgttgacat

SEQ ID NO: 15033 - RNA, 22 nt, synthetic construct
  misc_feature 1..22: note = HBV-targeting guide sequence portion
  source 1..22: mol_type = other RNA
cctcacaataccgcagagtcta

SEQ ID NO: 15034 - RNA, 22 nt, synthetic construct
  misc_feature 1..22: note = HBV-targeting guide sequence portion
  source 1..22: mol_type = other RNA
cctcaccatactgcactcaggc

SEQ ID NO: 15035 - RNA, 22 nt, synthetic construct
  misc_feature 1..22: note = HBV-targeting guide sequence portion
  source 1..22: mol_type = other RNA
cctcagcccgtttctcttggct

SEQ ID NO: 15036 - RNA, 22 nt, synthetic construct
  misc_feature 1..22: note = HBV-targeting guide sequence portion
  source 1..22: mol_type = other RNA
cctcaggctcagggcataatgc

SEQ ID NO: 15037 - RNA, 22 nt, synthetic construct
  misc_feature 1..22: note = HBV-targeting guide sequence portion
  source 1..22: mol_type = other RNA
cctcatcttcttgttggttctt

SEQ ID NO: 15038 - RNA, 22 nt, synthetic construct
  misc_feature 1..22: note = HBV-targeting guide sequence portion
  source 1..22: mol_type = other RNA
cctcattctgtgggtcaccata

SEQ ID NO: 15039 - RNA, 22 nt, synthetic construct
  misc_feature 1..22: note = HBV-targeting guide sequence portion
  source 1..22: mol_type = other RNA
cctcattggaaaacaccctctt

SEQ ID NO: 15040 - RNA, 22 nt, synthetic construct
  misc_feature 1..22: note = HBV-targeting guide sequence portion
  source 1..22: mol_type = other RNA
cctccaacttgtcctggttatc

SEQ ID NO: 15041 - RNA, 22 nt, synthetic construct
  misc_feature 1..22: note = HBV-targeting guide sequence portion
  source 1..22: mol_type = other RNA
cctccaagctgtgccttgggtg

SEQ ID NO: 15042 - RNA, 22 nt, synthetic construct
  misc_feature 1..22: note = HBV-targeting guide sequence portion
  source 1..22: mol_type = other RNA
cctccaatcactcaccaacctc

SEQ ID NO: 15043 - RNA, 22 nt, synthetic construct
  misc_feature 1..22: note = HBV-targeting guide sequence portion
  source 1..22: mol_type = other RNA
cctccagcttatagaccaccaa

SEQ ID NO: 15044 - RNA, 22 nt, synthetic construct
  misc_feature 1..22: note = HBV-targeting guide sequence portion
  source 1..22: mol_type = other RNA
cctcccagtctttaaacaaaca

SEQ ID NO: 15045 - RNA, 22 nt, synthetic construct
  misc_feature 1..22: note = HBV-targeting guide sequence portion
  source 1..22: mol_type = other RNA
cctcccccaactcctcccagtc

SEQ ID NO: 15046 - RNA, 22 nt, synthetic construct
  misc_feature 1..22: note = HBV-targeting guide sequence portion
  source 1..22: mol_type = other RNA
cctccgtgcggtggggtgaacc

SEQ ID NO: 15047 - RNA, 22 nt, synthetic construct
  misc_feature 1..22: note = HBV-targeting guide sequence portion
  source 1..22: mol_type = other RNA
cctcctagtacaaagatcatta

SEQ ID NO: 15048 - RNA, 22 nt, synthetic construct
  misc_feature 1..22: note = HBV-targeting guide sequence portion
  source 1..22: mol_type = other RNA
cctcctgcctctaccaatcgcc

SEQ ID NO: 15049 - RNA, 22 nt, synthetic construct
  misc_feature 1..22: note = HBV-targeting guide sequence portion
  source 1..22: mol_type = other RNA
cctcctgtcctccaacttgtcc

SEQ ID NO: 15050 - RNA, 22 nt, synthetic construct
  misc_feature 1..22: note = HBV-targeting guide sequence portion
  source 1..22: mol_type = other RNA
cctcctgttgctgtacaaaacc

SEQ ID NO: 15051 - RNA, 22 nt, synthetic construct
  misc_feature 1..22: note = HBV-targeting guide sequence portion
  source 1..22: mol_type = other RNA
cctcgagaagattgacgatatg

SEQ ID NO: 15052 - RNA, 22 nt, synthetic construct
  misc_feature 1..22: note = HBV-targeting guide sequence portion
  source 1..22: mol_type = other RNA
cctcgagatgggtcgtccgcgg

SEQ ID NO: 15053 - RNA, 22 nt, synthetic construct
  misc_feature 1..22: note = HBV-targeting guide sequence portion
  source 1..22: mol_type = other RNA
cctcgcagacgaagatctcaat

SEQ ID NO: 15054 - RNA, 22 nt, synthetic construct
  misc_feature 1..22: note = HBV-targeting guide sequence portion
  source 1..22: mol_type = other RNA
cctcgcctcgcagacgaagatc

SEQ ID NO: 15055 - RNA, 22 nt, synthetic construct
  misc_feature 1..22: note = HBV-targeting guide sequence portion
  source 1..22: mol_type = other RNA
cctcgtcgtctaacaacacaag

SEQ ID NO: 15056 - RNA, 22 nt, synthetic construct
  misc_feature 1..22: note = HBV-targeting guide sequence portion
  source 1..22: mol_type = other RNA
cctctaattccaggatcatcaa

SEQ ID NO: 15057 - RNA, 22 nt, synthetic construct
  misc_feature 1..22: note = HBV-targeting guide sequence portion
  source 1..22: mol_type = other RNA
cctctaccaatcgccagtcagg

SEQ ID NO: 15058 - RNA, 22 nt, synthetic construct
  misc_feature 1..22: note = HBV-targeting guide sequence portion
  source 1..22: mol_type = other RNA
cctctatgtatccctcctgttg

SEQ ID NO: 15059 - RNA, 22 nt, synthetic construct
  misc_feature 1..22: note = HBV-targeting guide sequence portion
  source 1..22: mol_type = other RNA
cctctcacatatcgtcaatctt

SEQ ID NO: 15060 - RNA, 22 nt, synthetic construct
  misc_feature 1..22: note = HBV-targeting guide sequence portion
  source 1..22: mol_type = other RNA
cctctcactctgggatcttgca

SEQ ID NO: 15061 - RNA, 22 nt, synthetic construct
  misc_feature 1..22: note = HBV-targeting guide sequence portion
  source 1..22: mol_type = other RNA
cctctcccgcaaatatacatcg

SEQ ID NO: 15062 - RNA, 22 nt, synthetic construct
  misc_feature 1..22: note = HBV-targeting guide sequence portion
  source 1..22: mol_type = other RNA
cctctctttacgcggactcccc

SEQ ID NO: 15063 - RNA, 22 nt, synthetic construct
  misc_feature 1..22: note = HBV-targeting guide sequence portion
  source 1..22: mol_type = other RNA
cctctgagaaacactcatcctc

SEQ ID NO: 15064 - RNA, 22 nt, synthetic construct
  misc_feature 1..22: note = HBV-targeting guide sequence portion
  source 1..22: mol_type = other RNA
cctctgcacgtcgcatggagac

SEQ ID NO: 15065 - RNA, 22 nt, synthetic construct
  misc_feature 1..22: note = HBV-targeting guide sequence portion
  source 1..22: mol_type = other RNA
cctctgccgatccatactgcgg

SEQ ID NO: 15066 - RNA, 22 nt, synthetic construct
  misc_feature 1..22: note = HBV-targeting guide sequence portion
  source 1..22: mol_type = other RNA
cctctgcctaatcatctcttgt

SEQ ID NO: 15067 - RNA, 22 nt, synthetic construct
  misc_feature 1..22: note = HBV-targeting guide sequence portion
  source 1..22: mol_type = other RNA
cctctgggattctttcccgacc

SEQ ID NO: 15068 - RNA, 22 nt, synthetic construct
  misc_feature 1..22: note = HBV-targeting guide sequence portion
  source 1..22: mol_type = other RNA
cctcttatgtaagaccttgggc

SEQ ID NO: 15069 - RNA, 22 nt, synthetic construct
  misc_feature 1..22: note = HBV-targeting guide sequence portion
  source 1..22: mol_type = other RNA
cctcttcatcctgctgctatgc

SEQ ID NO: 15070 - RNA, 22 nt, synthetic construct
  misc_feature 1..22: note = HBV-targeting guide sequence portion
  source 1..22: mol_type = other RNA
cctcttctctgcctgccgttcc

SEQ ID NO: 15071 - RNA, 22 nt, synthetic construct
  misc_feature 1..22: note = HBV-targeting guide sequence portion
  source 1..22: mol_type = other RNA
cctcttttcctaatatacatct

SEQ ID NO: 15072 - RNA, 22 nt, synthetic construct
  misc_feature 1..22: note = HBV-targeting guide sequence portion
  source 1..22: mol_type = other RNA
cctgaacctttaccccgttgcc

SEQ ID NO: 15073 - RNA, 22 nt, synthetic construct
  misc_feature 1..22: note = HBV-targeting guide sequence portion
  source 1..22: mol_type = other RNA
cctgaactggagccaccagcag

SEQ ID NO: 15074 - RNA, 22 nt, synthetic construct
  misc_feature 1..22: note = HBV-targeting guide sequence portion
  source 1..22: mol_type = other RNA
cctgactggcgattggtagagg

SEQ ID NO: 15075 - RNA, 22 nt, synthetic construct
  misc_feature 1..22: note = HBV-targeting guide sequence portion
  source 1..22: mol_type = other RNA
cctgagcattgttcacctcacc

SEQ ID NO: 15076 - RNA, 22 nt, synthetic construct
  misc_feature 1..22: note = HBV-targeting guide sequence portion
  source 1..22: mol_type = other RNA
cctgagcctgagggctccaccc

SEQ ID NO: 15077 - RNA, 22 nt, synthetic construct
  misc_feature 1..22: note = HBV-targeting guide sequence portion
  source 1..22: mol_type = other RNA
cctgaggatgagtgtttctcag

SEQ ID NO: 15078 - RNA, 22 nt, synthetic construct
  misc_feature 1..22: note = HBV-targeting guide sequence portion
  source 1..22: mol_type = other RNA
cctgagggctccaccccaaaag

SEQ ID NO: 15079 - RNA, 22 nt, synthetic construct
  misc_feature 1..22: note = HBV-targeting guide sequence portion
  source 1..22: mol_type = other RNA
cctgagtgcagtatggtgaggt

SEQ ID NO: 15080 - RNA, 22 nt, synthetic construct
  misc_feature 1..22: note = HBV-targeting guide sequence portion
  source 1..22: mol_type = other RNA
cctgatgtgatgttctccatgt

SEQ ID NO: 15081 - RNA, 22 nt, synthetic construct
  misc_feature 1..22: note = HBV-targeting guide sequence portion
  source 1..22: mol_type = other RNA
cctgcacgactcctgctcaagg

SEQ ID NO: 15082 - RNA, 22 nt, synthetic construct
  misc_feature 1..22: note = HBV-targeting guide sequence portion
  source 1..22: mol_type = other RNA
cctgcagaacctgcacgactcc

SEQ ID NO: 15083 - RNA, 22 nt, synthetic construct
  misc_feature 1..22: note = HBV-targeting guide sequence portion
  source 1..22: mol_type = other RNA
cctgccgttccgaccgaccacg

SEQ ID NO: 15084 - RNA, 22 nt, synthetic construct
  misc_feature 1..22: note = HBV-targeting guide sequence portion
  source 1..22: mol_type = other RNA
cctgcctcgtcgtctaacaaca

SEQ ID NO: 15085 - RNA, 22 nt, synthetic construct
  misc_feature 1..22: note = HBV-targeting guide sequence portion
  source 1..22: mol_type = other RNA
cctgcctctaccaatcgccagt

SEQ ID NO: 15086 - RNA, 22 nt, synthetic construct
  misc_feature 1..22: note = HBV-targeting guide sequence portion
  source 1..22: mol_type = other RNA
cctgcgcgggacgtcctttgtt

SEQ ID NO: 15087 - RNA, 22 nt, synthetic construct
  misc_feature 1..22: note = HBV-targeting guide sequence portion
  source 1..22: mol_type = other RNA
cctgcgctgaacatggagaaca

SEQ ID NO: 15088 - RNA, 22 nt, synthetic construct
  misc_feature 1..22: note = HBV-targeting guide sequence portion
  source 1..22: mol_type = other RNA
cctgctaggttttatcctaaat

SEQ ID NO: 15089 - RNA, 22 nt, synthetic construct
  misc_feature 1..22: note = HBV-targeting guide sequence portion
  source 1..22: mol_type = other RNA
cctgctcaaggaacctctatgt

SEQ ID NO: 15090 - RNA, 22 nt, synthetic construct
  misc_feature 1..22: note = HBV-targeting guide sequence portion
  source 1..22: mol_type = other RNA
cctgctcgtgttacaggcgggg

SEQ ID NO: 15091 - RNA, 22 nt, synthetic construct
  misc_feature 1..22: note = HBV-targeting guide sequence portion
  source 1..22: mol_type = other RNA
cctgctgctatgcctcatcttc

SEQ ID NO: 15092 - RNA, 22 nt, synthetic construct
  misc_feature 1..22: note = HBV-targeting guide sequence portion
  source 1..22: mol_type = other RNA
cctgctggtggctccagttcag

SEQ ID NO: 15093 - RNA, 22 nt, synthetic construct
  misc_feature 1..22: note = HBV-targeting guide sequence portion
  source 1..22: mol_type = other RNA
cctgcttagattgaatacatgc

SEQ ID NO: 15094 - RNA, 22 nt, synthetic construct
  misc_feature 1..22: note = HBV-targeting guide sequence portion
  source 1..22: mol_type = other RNA
cctgctttaatgcccttgtatg

SEQ ID NO: 15095 - RNA, 22 nt, synthetic construct
  misc_feature 1..22: note = HBV-targeting guide sequence portion
  source 1..22: mol_type = other RNA
cctggaattagaggacagacgg

SEQ ID NO: 15096 - RNA, 22 nt, synthetic construct
  misc_feature 1..22: note = HBV-targeting guide sequence portion
  source 1..22: mol_type = other RNA
cctggcaacggggtaaaggttc

SEQ ID NO: 15097 - RNA, 22 nt, synthetic construct
  misc_feature 1..22: note = HBV-targeting guide sequence portion
  source 1..22: mol_type = other RNA
cctggccagacgccaacaaggt

SEQ ID NO: 15098 - RNA, 22 nt, synthetic construct
  misc_feature 1..22: note = HBV-targeting guide sequence portion
  source 1..22: mol_type = other RNA
cctggccgttgcctggcaacgg

SEQ ID NO: 15099 - RNA, 22 nt, synthetic construct
  misc_feature 1..22: note = HBV-targeting guide sequence portion
  source 1..22: mol_type = other RNA
cctgggctttcggaaaattcct

SEQ ID NO: 15100 - RNA, 22 nt, synthetic construct
  misc_feature 1..22: note = HBV-targeting guide sequence portion
  source 1..22: mol_type = other RNA
cctgggtgggtactaatttaga

SEQ ID NO: 15101 - RNA, 22 nt, synthetic construct
  misc_feature 1..22: note = HBV-targeting guide sequence portion
  source 1..22: mol_type = other RNA
cctggttatcgctggatgtgtc

SEQ ID NO: 15102 - RNA, 22 nt, synthetic construct
  misc_feature 1..22: note = HBV-targeting guide sequence portion
  source 1..22: mol_type = other RNA
cctgtaacacgagcaggggtcc

SEQ ID NO: 15103 - RNA, 22 nt, synthetic construct
  misc_feature 1..22: note = HBV-targeting guide sequence portion
  source 1..22: mol_type = other RNA
cctgtatctccctgctggtggc

SEQ ID NO: 15104 - RNA, 22 nt, synthetic construct
  misc_feature 1..22: note = HBV-targeting guide sequence portion
  source 1..22: mol_type = other RNA
cctgtattcccatcccatcatc

SEQ ID NO: 15105 - RNA, 22 nt, synthetic construct
  misc_feature 1..22: note = HBV-targeting guide sequence portion
  source 1..22: mol_type = other RNA
cctgtcctccaacttgtcctgg

SEQ ID NO: 15106 - RNA, 22 nt, synthetic construct
  misc_feature 1..22: note = HBV-targeting guide sequence portion
  source 1..22: mol_type = other RNA
cctgtcgtcctcttctctgcct

SEQ ID NO: 15107 - RNA, 22 nt, synthetic construct
  misc_feature 1..22: note = HBV-targeting guide sequence portion
  source 1..22: mol_type = other RNA
cctgtctttaaccctcattgga

SEQ ID NO: 15108 - RNA, 22 nt, synthetic construct
  misc_feature 1..22: note = HBV-targeting guide sequence portion
  source 1..22: mol_type = other RNA
cctgttaaccgggagttttctg

SEQ ID NO: 15109 - RNA, 22 nt, synthetic construct
  misc_feature 1..22: note = HBV-targeting guide sequence portion
  source 1..22: mol_type = other RNA
cctgttccgactactgcctctc

SEQ ID NO: 15110 - RNA, 22 nt, synthetic construct
  misc_feature 1..22: note = HBV-targeting guide sequence portion
  source 1..22: mol_type = other RNA
cctgttgctgtacaaaaccttc

SEQ ID NO: 15111 - RNA, 22 nt, synthetic construct
  misc_feature 1..22: note = HBV-targeting guide sequence portion
  source 1..22: mol_type = other RNA
ccttatccaagggcaagtattt

SEQ ID NO: 15112 - RNA, 22 nt, synthetic construct
  misc_feature 1..22: note = HBV-targeting guide sequence portion
  source 1..22: mol_type = other RNA
ccttatgagtccaagggatact

SEQ ID NO: 15113 - RNA, 22 nt, synthetic construct
  misc_feature 1..22: note = HBV-targeting guide sequence portion
  source 1..22: mol_type = other RNA
ccttattatccagaacatctag

SEQ ID NO: 15114 - RNA, 22 nt, synthetic construct
  misc_feature 1..22: note = HBV-targeting guide sequence portion
  source 1..22: mol_type = other RNA
ccttcagagcaaactccaacaa

SEQ ID NO: 15115 - RNA, 22 nt, synthetic construct
  misc_feature 1..22: note = HBV-targeting guide sequence portion
  source 1..22: mol_type = other RNA
ccttccaccaaactctgcaaga

SEQ ID NO: 15116 - RNA, 22 nt, synthetic construct
  misc_feature 1..22: note = HBV-targeting guide sequence portion
  source 1..22: mol_type = other RNA
ccttccatagagtgtgtaaata

SEQ ID NO: 15117 - RNA, 22 nt, synthetic construct
  misc_feature 1..22: note = HBV-targeting guide sequence portion
  source 1..22: mol_type = other RNA
ccttccgtacgagatcttctag

SEQ ID NO: 15118 - RNA, 22 nt, synthetic construct
  misc_feature 1..22: note = HBV-targeting guide sequence portion
  source 1..22: mol_type = other RNA
ccttcggatggaaactgcacct

SEQ ID NO: 15119 - RNA, 22 nt, synthetic construct
  misc_feature 1..22: note = HBV-targeting guide sequence portion
  source 1..22: mol_type = other RNA
ccttctcatctgccggaccgtg

SEQ ID NO: 15120 - RNA, 22 nt, synthetic construct
  misc_feature 1..22: note = HBV-targeting guide sequence portion
  source 1..22: mol_type = other RNA
ccttctgacttctttccttccg

SEQ ID NO: 15121 - RNA, 22 nt, synthetic construct
  misc_feature 1..22: note = HBV-targeting guide sequence portion
  source 1..22: mol_type = other RNA
ccttgagcaggagtcgtgcagg

SEQ ID NO: 15122 - RNA, 22 nt, synthetic construct
  misc_feature 1..22: note = HBV-targeting guide sequence portion
  source 1..22: mol_type = other RNA
ccttgaggcatacttcaaagac

SEQ ID NO: 15123 - RNA, 22 nt, synthetic construct
  misc_feature 1..22: note = HBV-targeting guide sequence portion
  source 1..22: mol_type = other RNA
ccttgatagtccagaagaacca

SEQ ID NO: 15124 - RNA, 22 nt, synthetic construct
  misc_feature 1..22: note = HBV-targeting guide sequence portion
  source 1..22: mol_type = other RNA
ccttgccagcaaatccgcctcc

SEQ ID NO: 15125 - RNA, 22 nt, synthetic construct
  misc_feature 1..22: note = HBV-targeting guide sequence portion
  source 1..22: mol_type = other RNA
ccttggactcataaggtgggaa

SEQ ID NO: 15126 - RNA, 22 nt, synthetic construct
  misc_feature 1..22: note = HBV-targeting guide sequence portion
  source 1..22: mol_type = other RNA
ccttggagtctcctgagcattg

SEQ ID NO: 15127 - RNA, 22 nt, synthetic construct
  misc_feature 1..22: note = HBV-targeting guide sequence portion
  source 1..22: mol_type = other RNA
ccttggataagggtattaaacc

SEQ ID NO: 15128 - RNA, 22 nt, synthetic construct
  misc_feature 1..22: note = HBV-targeting guide sequence portion
  source 1..22: mol_type = other RNA
ccttgggcaagaattggtgggc

SEQ ID NO: 15129 - RNA, 22 nt, synthetic construct
  misc_feature 1..22: note = HBV-targeting guide sequence portion
  source 1..22: mol_type = other RNA
ccttgggtggctttagggcatg

SEQ ID NO: 15130 - RNA, 22 nt, synthetic construct
  misc_feature 1..22: note = HBV-targeting guide sequence portion
  source 1..22: mol_type = other RNA
ccttgtaagttggcgaaaaagt

SEQ ID NO: 15131 - RNA, 22 nt, synthetic construct
  misc_feature 1..22: note = HBV-targeting guide sequence portion
  source 1..22: mol_type = other RNA
ccttgtatgcatgtattcaatc

SEQ ID NO: 15132 - RNA, 22 nt, synthetic construct
  misc_feature 1..22: note = HBV-targeting guide sequence portion
  source 1..22: mol_type = other RNA
ccttgttgacaagaatcctcac

SEQ ID NO: 15133 - RNA, 22 nt, synthetic construct
  misc_feature 1..22: note = HBV-targeting guide sequence portion
  source 1..22: mol_type = other RNA
ccttgttggcgtctggccaggg

SEQ ID NO: 15134 - RNA, 22 nt, synthetic construct
  misc_feature 1..22: note = HBV-targeting guide sequence portion
  source 1..22: mol_type = other RNA
ccttgttgggattgaagtccca

SEQ ID NO: 15135 - RNA, 22 nt, synthetic construct
  misc_feature 1..22: note = HBV-targeting guide sequence portion
  source 1..22: mol_type = other RNA
cctttaccccgttgccaggcaa

SEQ ID NO: 15136 - RNA, 22 nt, synthetic construct
  misc_feature 1..22: note = HBV-targeting guide sequence portion
  source 1..22: mol_type = other RNA
cctttataccgctgttaccaat

SEQ ID NO: 15137 - RNA, 22 nt, synthetic construct
  misc_feature 1..22: note = HBV-targeting guide sequence portion
  source 1..22: mol_type = other RNA
cctttccggctcctctgccgat

SEQ ID NO: 15138 - RNA, 22 nt, synthetic construct
  misc_feature 1..22: note = HBV-targeting guide sequence portion
  source 1..22: mol_type = other RNA
cctttctgtgtaaacaatacct

SEQ ID NO: 15139 - RNA, 22 nt, synthetic construct
  misc_feature 1..22: note = HBV-targeting guide sequence portion
  source 1..22: mol_type = other RNA
cctttgtttacgtcccgtcggc

SEQ ID NO: 15140 - RNA, 22 nt, synthetic construct
  misc_feature 1..22: note = HBV-targeting guide sequence portion
  source 1..22: mol_type = other RNA
ccttttacacaatgtggttatc

SEQ ID NO: 15141 - RNA, 22 nt, synthetic construct
  misc_feature 1..22: note = HBV-targeting guide sequence portion
  source 1..22: mol_type = other RNA
ccttttggggtggagccctcag

SEQ ID NO: 15142 - RNA, 22 nt, synthetic construct
  misc_feature 1..22: note = HBV-targeting guide sequence portion
  source 1..22: mol_type = other RNA
cgaaaaagtgaaagcctgctta

SEQ ID NO: 15143 - RNA, 22 nt, synthetic construct
  misc_feature 1..22: note = HBV-targeting guide sequence portion
  source 1..22: mol_type = other RNA
cgaaagcccaggatgatgggat

SEQ ID NO: 15144 - RNA, 22 nt, synthetic construct
  misc_feature 1..22: note = HBV-targeting guide sequence portion
  source 1..22: mol_type = other RNA
cgaaccactgaacaaatggcac

SEQ ID NO: 15145 - RNA, 22 nt, synthetic construct
  misc_feature 1..22: note = HBV-targeting guide sequence portion
  source 1..22: mol_type = other RNA
cgaagatctcaatcgccgcgtc

SEQ ID NO: 15146 - RNA, 22 nt, synthetic construct
  misc_feature 1..22: note = HBV-targeting guide sequence portion
  source 1..22: mol_type = other RNA
cgaaggttttgtacagcaacag

SEQ ID NO: 15147 - RNA, 22 nt, synthetic construct
  misc_feature 1..22: note = HBV-targeting guide sequence portion
  source 1..22: mol_type = other RNA
cgaagtgcacacggtccggcag

SEQ ID NO: 15148 - RNA, 22 nt, synthetic construct
  misc_feature 1..22: note = HBV-targeting guide sequence portion
  source 1..22: mol_type = other RNA
cgaatccacactccaaaagaca

SEQ ID NO: 15149 - RNA, 22 nt, synthetic construct
  misc_feature 1..22: note = HBV-targeting guide sequence portion
  source 1..22: mol_type = other RNA
cgaatgctccagctcctacctt

SEQ ID NO: 15150 - RNA, 22 nt, synthetic construct
  misc_feature 1..22: note = HBV-targeting guide sequence portion
  source 1..22: mol_type = other RNA
cgaattgtgggtcttctgggtt

SEQ ID NO: 15151 - RNA, 22 nt, synthetic construct
  misc_feature 1..22: note = HBV-targeting guide sequence portion
  source 1..22: mol_type = other RNA
cgaattttggccaagacacacg

SEQ ID NO: 15152 - RNA, 22 nt, synthetic construct
  misc_feature 1..22: note = HBV-targeting guide sequence portion
  source 1..22: mol_type = other RNA
cgacagggccccaagcggcctc

SEQ ID NO: 15153 - RNA, 22 nt, synthetic construct
  misc_feature 1..22: note = HBV-targeting guide sequence portion
  source 1..22: mol_type = other RNA
cgaccaccagttggacccagcc

SEQ ID NO: 15154 - RNA, 22 nt, synthetic construct
  misc_feature 1..22: note = HBV-targeting guide sequence portion
  source 1..22: mol_type = other RNA
cgaccacggggcgcacctctct

SEQ ID NO: 15155 - RNA, 22 nt, synthetic construct
  misc_feature 1..22: note = HBV-targeting guide sequence portion
  source 1..22: mol_type = other RNA
cgacccatctcgaggccgcttg

SEQ ID NO: 15156 - RNA, 22 nt, synthetic construct
  misc_feature 1..22: note = HBV-targeting guide sequence portion
  source 1..22: mol_type = other RNA
cgaccgaccacggggcgcacct

SEQ ID NO: 15157 - RNA, 22 nt, synthetic construct
  misc_feature 1..22: note = HBV-targeting guide sequence portion
  source 1..22: mol_type = other RNA
cgaccgaccttgaggcatactt

SEQ ID NO: 15158 - RNA, 22 nt, synthetic construct
  misc_feature 1..22: note = HBV-targeting guide sequence portion
  source 1..22: mol_type = other RNA
cgaccttgaggcatacttcaaa

SEQ ID NO: 15159 - RNA, 22 nt, synthetic construct
  misc_feature 1..22: note = HBV-targeting guide sequence portion
  source 1..22: mol_type = other RNA
cgacgaggcaggtcccctagaa

SEQ ID NO: 15160 - RNA, 22 nt, synthetic construct
  misc_feature 1..22: note = HBV-targeting guide sequence portion
  source 1..22: mol_type = other RNA
cgacgcggcgattgagatcttc

SEQ ID NO: 15161 - RNA, 22 nt, synthetic construct
  misc_feature 1..22: note = HBV-targeting guide sequence portion
  source 1..22: mol_type = other RNA
cgacgggacgtaaacaaaggac

SEQ ID NO: 15162 - RNA, 22 nt, synthetic construct
  misc_feature 1..22: note = HBV-targeting guide sequence portion
  source 1..22: mol_type = other RNA
cgacgtgcagaggtgaagcgaa

SEQ ID NO: 15163 - RNA, 22 nt, synthetic construct
  misc_feature 1..22: note = HBV-targeting guide sequence portion
  source 1..22: mol_type = other RNA
cgactactgcctctcacatatc

SEQ ID NO: 15164 - RNA, 22 nt, synthetic construct
  misc_feature 1..22: note = HBV-targeting guide sequence portion
  source 1..22: mol_type = other RNA
cgactcctgctcaaggaacctc

SEQ ID NO: 15165 - RNA, 22 nt, synthetic construct
  misc_feature 1..22: note = HBV-targeting guide sequence portion
  source 1..22: mol_type = other RNA
cgagaagattgacgatatgtga

SEQ ID NO: 15166 - RNA, 22 nt, synthetic construct
  misc_feature 1..22: note = HBV-targeting guide sequence portion
  source 1..22: mol_type = other RNA
cgagaatgtttgctccagaccg

SEQ ID NO: 15167 - RNA, 22 nt, synthetic construct
  misc_feature 1..22: note = HBV-targeting guide sequence portion
  source 1..22: mol_type = other RNA
cgagagtaactccacagtagct

SEQ ID NO: 15168 - RNA, 22 nt, synthetic construct
  misc_feature 1..22: note = HBV-targeting guide sequence portion
  source 1..22: mol_type = other RNA
cgagatcttctagataccgccg

SEQ ID NO: 15169 - RNA, 22 nt, synthetic construct
  misc_feature 1..22: note = HBV-targeting guide sequence portion
  source 1..22: mol_type = other RNA
cgagatgggtcgtccgcgggat

SEQ ID NO: 15170 - RNA, 22 nt, synthetic construct
  misc_feature 1..22: note = HBV-targeting guide sequence portion
  source 1..22: mol_type = other RNA
cgagattgagatcttctgcgac

SEQ ID NO: 15171 - RNA, 22 nt, synthetic construct
  misc_feature 1..22: note = HBV-targeting guide sequence portion
  source 1..22: mol_type = other RNA
cgagcaaaacaagcggctagga

SEQ ID NO: 15172 - RNA, 22 nt, synthetic construct
  misc_feature 1..22: note = HBV-targeting guide sequence portion
  source 1..22: mol_type = other RNA
cgagcaggggtcctaggaatcc

SEQ ID NO: 15173 - RNA, 22 nt, synthetic construct
  misc_feature 1..22: note = HBV-targeting guide sequence portion
  source 1..22: mol_type = other RNA
cgaggattggggaccctgcgct

SEQ ID NO: 15174 - RNA, 22 nt, synthetic construct
  misc_feature 1..22: note = HBV-targeting guide sequence portion
  source 1..22: mol_type = other RNA
cgaggcaggtcccctagaagaa

SEQ ID NO: 15175 - RNA, 22 nt, synthetic construct
  misc_feature 1..22: note = HBV-targeting guide sequence portion
  source 1..22: mol_type = other RNA
cgaggccgcttggggccctgtc

SEQ ID NO: 15176 - RNA, 22 nt, synthetic construct
  misc_feature 1..22: note = HBV-targeting guide sequence portion
  source 1..22: mol_type = other RNA
cgaggcgagggagttcttcttc

SEQ ID NO: 15177 - RNA, 22 nt, synthetic construct
  misc_feature 1..22: note = HBV-targeting guide sequence portion
  source 1..22: mol_type = other RNA
cgagggagttcttcttctaggg

SEQ ID NO: 15178 - RNA, 22 nt, synthetic construct
  misc_feature 1..22: note = HBV-targeting guide sequence portion
  source 1..22: mol_type = other RNA
cgagtctagactctgcggtatt

SEQ ID NO: 15179 - RNA, 22 nt, synthetic construct
  misc_feature 1..22: note = HBV-targeting guide sequence portion
  source 1..22: mol_type = other RNA
cgataaccaggacaagttggag

SEQ ID NO: 15180 - RNA, 22 nt, synthetic construct
  misc_feature 1..22: note = HBV-targeting guide sequence portion
  source 1..22: mol_type = other RNA
cgatacagagctgcggcggtat

SEQ ID NO: 15181 - RNA, 22 nt, synthetic construct
  misc_feature 1..22: note = HBV-targeting guide sequence portion
  source 1..22: mol_type = other RNA
cgatatgtgagaggcagtagtc

SEQ ID NO: 15182 - RNA, 22 nt, synthetic construct
  misc_feature 1..22: note = HBV-targeting guide sequence portion
  source 1..22: mol_type = other RNA
cgatccatactgcggaactcct

SEQ ID NO: 15183 - RNA, 22 nt, synthetic construct
  misc_feature 1..22: note = HBV-targeting guide sequence portion
  source 1..22: mol_type = other RNA
cgatgtatatttgcgggagagg

SEQ ID NO: 15184 - RNA, 22 nt, synthetic construct
  misc_feature 1..22: note = HBV-targeting guide sequence portion
  source 1..22: mol_type = other RNA
cgattgagatcttcgtctgcga

SEQ ID NO: 15185 - RNA, 22 nt, synthetic construct
  misc_feature 1..22: note = HBV-targeting guide sequence portion
  source 1..22: mol_type = other RNA
cgattggtagaggcaggaggcg

SEQ ID NO: 15186 - RNA, 22 nt, synthetic construct
  misc_feature 1..22: note = HBV-targeting guide sequence portion
  source 1..22: mol_type = other RNA
cgcaaatatacatcgttcccat

SEQ ID NO: 15187 - RNA, 22 nt, synthetic construct
  misc_feature 1..22: note = HBV-targeting guide sequence portion
  source 1..22: mol_type = other RNA
cgcaccagcaccatgcaacttt

SEQ ID NO: 15188 - RNA, 22 nt, synthetic construct
  misc_feature 1..22: note = HBV-targeting guide sequence portion
  source 1..22: mol_type = other RNA
cgcacctctctttacgcggact

SEQ ID NO: 15189 - RNA, 22 nt, synthetic construct
  misc_feature 1..22: note = HBV-targeting guide sequence portion
  source 1..22: mol_type = other RNA
cgcacggaggccttttggggtg

SEQ ID NO: 15190 - RNA, 22 nt, synthetic construct
  misc_feature 1..22: note = HBV-targeting guide sequence portion
  source 1..22: mol_type = other RNA
cgcactcctccagcttatagac

SEQ ID NO: 15191 - RNA, 22 nt, synthetic construct
  misc_feature 1..22: note = HBV-targeting guide sequence portion
  source 1..22: mol_type = other RNA
cgcagaagatctcaatctcggg

SEQ ID NO: 15192 - RNA, 22 nt, synthetic construct
  misc_feature 1..22: note = HBV-targeting guide sequence portion
  source 1..22: mol_type = other RNA
cgcagacacatccagcgataac

SEQ ID NO: 15193 - RNA, 22 nt, synthetic construct
  misc_feature 1..22: note = HBV-targeting guide sequence portion
  source 1..22: mol_type = other RNA
cgcagaccaatttatgcctaca

SEQ ID NO: 15194 - RNA, 22 nt, synthetic construct
  misc_feature 1..22: note = HBV-targeting guide sequence portion
  source 1..22: mol_type = other RNA
cgcagacgaagatctcaatcgc

SEQ ID NO: 15195 - RNA, 22 nt, synthetic construct
  misc_feature 1..22: note = HBV-targeting guide sequence portion
  source 1..22: mol_type = other RNA
cgcagagtctagactcgtggtg

SEQ ID NO: 15196 - RNA, 22 nt, synthetic construct
  misc_feature 1..22: note = HBV-targeting guide sequence portion
  source 1..22: mol_type = other RNA
cgcagccggtctggagcaaaca

SEQ ID NO: 15197 - RNA, 22 nt, synthetic construct
  misc_feature 1..22: note = HBV-targeting guide sequence portion
  source 1..22: mol_type = other RNA
cgcagctctgtatcgggatgcc

SEQ ID NO: 15198 - RNA, 22 nt, synthetic construct
  misc_feature 1..22: note = HBV-targeting guide sequence portion
  source 1..22: mol_type = other RNA
cgcaggatccagttggcagcac

SEQ ID NO: 15199 - RNA, 22 nt, synthetic construct
  misc_feature 1..22: note = HBV-targeting guide sequence portion
  source 1..22: mol_type = other RNA
cgcagggtccccaatcctcgag

SEQ ID NO: 15200 - RNA, 22 nt, synthetic construct
  misc_feature 1..22: note = HBV-targeting guide sequence portion
  source 1..22: mol_type = other RNA
cgcagtatggatcggcagagga

SEQ ID NO: 15201 - RNA, 22 nt, synthetic construct
  misc_feature 1..22: note = HBV-targeting guide sequence portion
  source 1..22: mol_type = other RNA
cgcagtccccaacctccaatca

SEQ ID NO: 15202 - RNA, 22 nt, synthetic construct
  misc_feature 1..22: note = HBV-targeting guide sequence portion
  source 1..22: mol_type = other RNA
cgcatgcgctgatggcctatga

SEQ ID NO: 15203 - RNA, 22 nt, synthetic construct
  misc_feature 1..22: note = HBV-targeting guide sequence portion
  source 1..22: mol_type = other RNA
cgcatgcgtggaacctttccgg

SEQ ID NO: 15204 - RNA, 22 nt, synthetic construct
  misc_feature 1..22: note = HBV-targeting guide sequence portion
  source 1..22: mol_type = other RNA
cgcatggagaccaccgtgaacg

SEQ ID NO: 15205 - RNA, 22 nt, synthetic construct
  misc_feature 1..22: note = HBV-targeting guide sequence portion
  source 1..22: mol_type = other RNA
cgccaacaaggtaggagctgga

SEQ ID NO: 15206 - RNA, 22 nt, synthetic construct
  misc_feature 1..22: note = HBV-targeting guide sequence portion
  source 1..22: mol_type = other RNA
cgccaacttacaaggcctttct

SEQ ID NO: 15207 - RNA, 22 nt, synthetic construct
  misc_feature 1..22: note = HBV-targeting guide sequence portion
  source 1..22: mol_type = other RNA
cgccagtcaggacggcagccta

SEQ ID NO: 15208 - RNA, 22 nt, synthetic construct
  misc_feature 1..22: note = HBV-targeting guide sequence portion
  source 1..22: mol_type = other RNA
cgcccaccaattcttgcccaag

SEQ ID NO: 15209 - RNA, 22 nt, synthetic construct
  misc_feature 1..22: note = HBV-targeting guide sequence portion
  source 1..22: mol_type = other RNA
cgccccgtggtcggtcggaacg

SEQ ID NO: 15210 - RNA, 22 nt, synthetic construct
  misc_feature 1..22: note = HBV-targeting guide sequence portion
  source 1..22: mol_type = other RNA
cgccgacgggacgtaaacaaag

SEQ ID NO: 15211 - RNA, 22 nt, synthetic construct
  misc_feature 1..22: note = HBV-targeting guide sequence portion
  source 1..22: mol_type = other RNA
cgccgcagacacatccagcgat

SEQ ID NO: 15212 - RNA, 22 nt, synthetic construct
  misc_feature 1..22: note = HBV-targeting guide sequence portion
  source 1..22: mol_type = other RNA
cgccgcagctctgtatcgggat

SEQ ID NO: 15213 - RNA, 22 nt, synthetic construct
  misc_feature 1..22: note = HBV-targeting guide sequence portion
  source 1..22: mol_type = other RNA
cgccgcgtcgcagaagatctca

SEQ ID NO: 15214 - RNA, 22 nt, synthetic construct
  misc_feature 1..22: note = HBV-targeting guide sequence portion
  source 1..22: mol_type = other RNA
cgcctcattctgtgggtcacca

SEQ ID NO: 15215 - RNA, 22 nt, synthetic construct
  misc_feature 1..22: note = HBV-targeting guide sequence portion
  source 1..22: mol_type = other RNA
cgcctcctgcctctaccaatcg

SEQ ID NO: 15216 - RNA, 22 nt, synthetic construct
  misc_feature 1..22: note = HBV-targeting guide sequence portion
  source 1..22: mol_type = other RNA
cgcctcgcagacgaagatctca

SEQ ID NO: 15217 - RNA, 22 nt, synthetic construct
  misc_feature 1..22: note = HBV-targeting guide sequence portion
  source 1..22: mol_type = other RNA
cgcctgtaacacgagcaggggt

SEQ ID NO: 15218 - RNA, 22 nt, synthetic construct
  misc_feature 1..22: note = HBV-targeting guide sequence portion
  source 1..22: mol_type = other RNA
cgccttccatagagtgtgtaaa

SEQ ID NO: 15219 - RNA, 22 nt, synthetic construct
  misc_feature 1..22: note = HBV-targeting guide sequence portion
  source 1..22: mol_type = other RNA
cgcgcaggatccagttggcagc

SEQ ID NO: 15220 - RNA, 22 nt, synthetic construct
  misc_feature 1..22: note = HBV-targeting guide sequence portion
  source 1..22: mol_type = other RNA
cgcggacgacccatctcgaggc

SEQ ID NO: 15221 - RNA, 22 nt, synthetic construct
  misc_feature 1..22: note = HBV-targeting guide sequence portion
  source 1..22: mol_type = other RNA
cgcggactccccgtctgtgcct

SEQ ID NO: 15222 - RNA, 22 nt, synthetic construct
  misc_feature 1..22: note = HBV-targeting guide sequence portion
  source 1..22: mol_type = other RNA
cgcggcgattgagatcttcgtc

SEQ ID NO: 15223 - RNA, 22 nt, synthetic construct
  misc_feature 1..22: note = HBV-targeting guide sequence portion
  source 1..22: mol_type = other RNA
cgcgggacgtcctttgtttacg

SEQ ID NO: 15224 - RNA, 22 nt, synthetic construct
  misc_feature 1..22: note = HBV-targeting guide sequence portion
  source 1..22: mol_type = other RNA
cgcgggattcagcgccgacggg

SEQ ID NO: 15225 - RNA, 22 nt, synthetic construct
  misc_feature 1..22: note = HBV-targeting guide sequence portion
  source 1..22: mol_type = other RNA
cgcgtaaagagaggtgcgcccc

SEQ ID NO: 15226 - RNA, 22 nt, synthetic construct
  misc_feature 1..22: note = HBV-targeting guide sequence portion
  source 1..22: mol_type = other RNA
cgcgtcgcagaagatctcaatc

SEQ ID NO: 15227 - RNA, 22 nt, synthetic construct
  misc_feature 1..22: note = HBV-targeting guide sequence portion
  source 1..22: mol_type = other RNA
cgctatgtgttgacactctctt

SEQ ID NO: 15228 - RNA, 22 nt, synthetic construct
  misc_feature 1..22: note = HBV-targeting guide sequence portion
  source 1..22: mol_type = other RNA
cgctgaacatggagaacatcac

SEQ ID NO: 15229 - RNA, 22 nt, synthetic construct
  misc_feature 1..22: note = HBV-targeting guide sequence portion
  source 1..22: mol_type = other RNA
cgctgaatcccgcggacgaccc

SEQ ID NO: 15230 - RNA, 22 nt, synthetic construct
  misc_feature 1..22: note = HBV-targeting guide sequence portion
  source 1..22: mol_type = other RNA
cgctgatggcctatgaccaagc

SEQ ID NO: 15231 - RNA, 22 nt, synthetic construct
  misc_feature 1..22: note = HBV-targeting guide sequence portion
  source 1..22: mol_type = other RNA
cgctggatgtgtctgcggcgtt

SEQ ID NO: 15232 - RNA, 22 nt, synthetic construct
  misc_feature 1..22: note = HBV-targeting guide sequence portion
  source 1..22: mol_type = other RNA
cgctgtctccacctctgagaaa

SEQ ID NO: 15233 - RNA, 22 nt, synthetic construct
  misc_feature 1..22: note = HBV-targeting guide sequence portion
  source 1..22: mol_type = other RNA
cgctgttaccaattttcttttg

SEQ ID NO: 15234 - RNA, 22 nt, synthetic construct
  misc_feature 1..22: note = HBV-targeting guide sequence portion
  source 1..22: mol_type = other RNA
cgcttacagttaatgagaaaag

SEQ ID NO: 15235 - RNA, 22 nt, synthetic construct
  misc_feature 1..22: note = HBV-targeting guide sequence portion
  source 1..22: mol_type = other RNA
cgcttcacctctgcacgtcgca

SEQ ID NO: 15236 - RNA, 22 nt, synthetic construct
  misc_feature 1..22: note = HBV-targeting guide sequence portion
  source 1..22: mol_type = other RNA
cgcttggggccctgtcgtcctc

SEQ ID NO: 15237 - RNA, 22 nt, synthetic construct
  misc_feature 1..22: note = HBV-targeting guide sequence portion
  source 1..22: mol_type = other RNA
cgcttgttttgctcgcagccgg

SEQ ID NO: 15238 - RNA, 22 nt, synthetic construct
  misc_feature 1..22: note = HBV-targeting guide sequence portion
  source 1..22: mol_type = other RNA
cggaaaattcctatgggagtgg

SEQ ID NO: 15239 - RNA, 22 nt, synthetic construct
  misc_feature 1..22: note = HBV-targeting guide sequence portion
  source 1..22: mol_type = other RNA
cggaaaggttccacgcatgcgc

SEQ ID NO: 15240 - RNA, 22 nt, synthetic construct
  misc_feature 1..22: note = HBV-targeting guide sequence portion
  source 1..22: mol_type = other RNA
cggaacagggtttactgttcct

SEQ ID NO: 15241 - RNA, 22 nt, synthetic construct
  misc_feature 1..22: note = HBV-targeting guide sequence portion
  source 1..22: mol_type = other RNA
cggaacggcaggcagagaagag

SEQ ID NO: 15242 - RNA, 22 nt, synthetic construct
  misc_feature 1..22: note = HBV-targeting guide sequence portion
  source 1..22: mol_type = other RNA
cggaactcctagccgcttgttt

SEQ ID NO: 15243 - RNA, 22 nt, synthetic construct
  misc_feature 1..22: note = HBV-targeting guide sequence portion
  source 1..22: mol_type = other RNA
cggaaggaaagaagtcagaagg

SEQ ID NO: 15244 - RNA, 22 nt, synthetic construct
  misc_feature 1..22: note = HBV-targeting guide sequence portion
  source 1..22: mol_type = other RNA
cggaagtgttgataggataggg

SEQ ID NO: 15245 - RNA, 22 nt, synthetic construct
  misc_feature 1..22: note = HBV-targeting guide sequence portion
  source 1..22: mol_type = other RNA
cggaccgtgtgcacttcgcttc

SEQ ID NO: 15246 - RNA, 22 nt, synthetic construct
  misc_feature 1..22: note = HBV-targeting guide sequence portion
  source 1..22: mol_type = other RNA
cggacgacccatctcgaggccg

SEQ ID NO: 15247 - RNA, 22 nt, synthetic construct
  misc_feature 1..22: note = HBV-targeting guide sequence portion
  source 1..22: mol_type = other RNA
cggactccccgtctgtgccttc

SEQ ID NO: 15248 - RNA, 22 nt, synthetic construct
  misc_feature 1..22: note = HBV-targeting guide sequence portion
  source 1..22: mol_type = other RNA
cggagacttgtgttgttagacg

SEQ ID NO: 15249 - RNA, 22 nt, synthetic construct
  misc_feature 1..22: note = HBV-targeting guide sequence portion
  source 1..22: mol_type = other RNA
cggaggccttttggggtggagc

SEQ ID NO: 15250 - RNA, 22 nt, synthetic construct
  misc_feature 1..22: note = HBV-targeting guide sequence portion
  source 1..22: mol_type = other RNA
cggatggaaactgcacctgtat

SEQ ID NO: 15251 - RNA, 22 nt, synthetic construct
  misc_feature 1..22: note = HBV-targeting guide sequence portion
  source 1..22: mol_type = other RNA
cggatttgctggcaaggtttgc

SEQ ID NO: 15252 - RNA, 22 nt, synthetic construct
  misc_feature 1..22: note = HBV-targeting guide sequence portion
  source 1..22: mol_type = other RNA
cggcagaggagccggaaaggtt

SEQ ID NO: 15253 - RNA, 22 nt, synthetic construct
  misc_feature 1..22: note = HBV-targeting guide sequence portion
  source 1..22: mol_type = other RNA
cggcagatgagaaggcacagac

SEQ ID NO: 15254 - RNA, 22 nt, synthetic construct
  misc_feature 1..22: note = HBV-targeting guide sequence portion
  source 1..22: mol_type = other RNA
cggcagcctaccccgctgtctc

SEQ ID NO: 15255 - RNA, 22 nt, synthetic construct
  misc_feature 1..22: note = HBV-targeting guide sequence portion
  source 1..22: mol_type = other RNA
cggcaggcagagaagaggacga

SEQ ID NO: 15256 - RNA, 22 nt, synthetic construct
  misc_feature 1..22: note = HBV-targeting guide sequence portion
  source 1..22: mol_type = other RNA
cggccaggtctgtgccaagtgt

SEQ ID NO: 15257 - RNA, 22 nt, synthetic construct
  misc_feature 1..22: note = HBV-targeting guide sequence portion
  source 1..22: mol_type = other RNA
cggcctcgagatgggtcgtccg

SEQ ID NO: 15258 - RNA, 22 nt, synthetic construct
  misc_feature 1..22: note = HBV-targeting guide sequence portion
  source 1..22: mol_type = other RNA
cggcgattgagatcttcgtctg

SEQ ID NO: 15259 - RNA, 22 nt, synthetic construct
  misc_feature 1..22: note = HBV-targeting guide sequence portion
  source 1..22: mol_type = other RNA
cggcgctgaatcccgcggacga

SEQ ID NO: 15260 - RNA, 22 nt, synthetic construct
  misc_feature 1..22: note = HBV-targeting guide sequence portion
  source 1..22: mol_type = other RNA
cggcggtatctagaagatctcg

SEQ ID NO: 15261 - RNA, 22 nt, synthetic construct
  misc_feature 1..22: note = HBV-targeting guide sequence portion
  source 1..22: mol_type = other RNA
cggcgttttatcatcttcctct

SEQ ID NO: 15262 - RNA, 22 nt, synthetic construct
  misc_feature 1..22: note = HBV-targeting guide sequence portion
  source 1..22: mol_type = other RNA
cggctaggagttccgcagtatg

SEQ ID NO: 15263 - RNA, 22 nt, synthetic construct
  misc_feature 1..22: note = HBV-targeting guide sequence portion
  source 1..22: mol_type = other RNA
cggctcctctgccgatccatac

SEQ ID NO: 15264 - RNA, 22 nt, synthetic construct
  misc_feature 1..22: note = HBV-targeting guide sequence portion
  source 1..22: mol_type = other RNA
cggctgcgagcaaaacaagcgg

SEQ ID NO: 15265 - RNA, 22 nt, synthetic construct
  misc_feature 1..22: note = HBV-targeting guide sequence portion
  source 1..22: mol_type = other RNA
cgggaaacataccttgatagtc

SEQ ID NO: 15266 - RNA, 22 nt, synthetic construct
  misc_feature 1..22: note = HBV-targeting guide sequence portion
  source 1..22: mol_type = other RNA
cgggaaagaatcccagaggatt

SEQ ID NO: 15267 - RNA, 22 nt, synthetic construct
  misc_feature 1..22: note = HBV-targeting guide sequence portion
  source 1..22: mol_type = other RNA
cgggaccctgcagaacctgcac

SEQ ID NO: 15268 - RNA, 22 nt, synthetic construct
  misc_feature 1..22: note = HBV-targeting guide sequence portion
  source 1..22: mol_type = other RNA
cgggacgtaaacaaaggacgtc

SEQ ID NO: 15269 - RNA, 22 nt, synthetic construct
  misc_feature 1..22: note = HBV-targeting guide sequence portion
  source 1..22: mol_type = other RNA
cgggacgtcctttgtttacgtc

SEQ ID NO: 15270 - RNA, 22 nt, synthetic construct
  misc_feature 1..22: note = HBV-targeting guide sequence portion
  source 1..22: mol_type = other RNA
cgggactgacaactctgttgtc

SEQ ID NO: 15271 - RNA, 22 nt, synthetic construct
  misc_feature 1..22: note = HBV-targeting guide sequence portion
  source 1..22: mol_type = other RNA
cgggagaggacaacagagttgt

SEQ ID NO: 15272 - RNA, 22 nt, synthetic construct
  misc_feature 1..22: note = HBV-targeting guide sequence portion
  source 1..22: mol_type = other RNA
cgggagttttctgaaacattct

SEQ ID NO: 15273 - RNA, 22 nt, synthetic construct
  misc_feature 1..22: note = HBV-targeting guide sequence portion
  source 1..22: mol_type = other RNA
cgggatgccttggagtctcctg

SEQ ID NO: 15274 - RNA, 22 nt, synthetic construct
  misc_feature 1..22: note = HBV-targeting guide sequence portion
  source 1..22: mol_type = other RNA
cgggattcagcgccgacgggac

SEQ ID NO: 15275 - RNA, 22 nt, synthetic construct
  misc_feature 1..22: note = HBV-targeting guide sequence portion
  source 1..22: mol_type = other RNA
cgggcctacaaactgttcacat

SEQ ID NO: 15276 - RNA, 22 nt, synthetic construct
  misc_feature 1..22: note = HBV-targeting guide sequence portion
  source 1..22: mol_type = other RNA
cgggctagggttcaccccaccg

SEQ ID NO: 15277 - RNA, 22 nt, synthetic construct
  misc_feature 1..22: note = HBV-targeting guide sequence portion
  source 1..22: mol_type = other RNA
cgggctgaggcccactcccata

SEQ ID NO: 15278 - RNA, 22 nt, synthetic construct
  misc_feature 1..22: note = HBV-targeting guide sequence portion
  source 1..22: mol_type = other RNA
cggggagtccgcgtaaagagag

SEQ ID NO: 15279 - RNA, 22 nt, synthetic construct
  misc_feature 1..22: note = HBV-targeting guide sequence portion
  source 1..22: mol_type = other RNA
cggggatctcaatgttagtatc

SEQ ID NO: 15280 - RNA, 22 nt, synthetic construct
  misc_feature 1..22: note = HBV-targeting guide sequence portion
  source 1..22: mol_type = other RNA
cggggcgcacctctctttacgc

SEQ ID NO: 15281 - RNA, 22 nt, synthetic construct
  misc_feature 1..22: note = HBV-targeting guide sequence portion
  source 1..22: mol_type = other RNA
cggggctttattcttctactgt

SEQ ID NO: 15282 - RNA, 22 nt, synthetic construct
  misc_feature 1..22: note = HBV-targeting guide sequence portion
  source 1..22: mol_type = other RNA
cggggtaaaggttcaggtattg

SEQ ID NO: 15283 - RNA, 22 nt, synthetic construct
  misc_feature 1..22: note = HBV-targeting guide sequence portion
  source 1..22: mol_type = other RNA
cggggtaggctgccgtcctgac

SEQ ID NO: 15284 - RNA, 22 nt, synthetic construct
  misc_feature 1..22: note = HBV-targeting guide sequence portion
  source 1..22: mol_type = other RNA
cggggttttccttgttgacaag

SEQ ID NO: 15285 - RNA, 22 nt, synthetic construct
  misc_feature 1..22: note = HBV-targeting guide sequence portion
  source 1..22: mol_type = other RNA
cgggtgttttatataagagagt

SEQ ID NO: 15286 - RNA, 22 nt, synthetic construct
  misc_feature 1..22: note = HBV-targeting guide sequence portion
  source 1..22: mol_type = other RNA
cggtagttccccctagaaaatt

SEQ ID NO: 15287 - RNA, 22 nt, synthetic construct
  misc_feature 1..22: note = HBV-targeting guide sequence portion
  source 1..22: mol_type = other RNA
cggtataaagggactcaagatg

SEQ ID NO: 15288 - RNA, 22 nt, synthetic construct
  misc_feature 1..22: note = HBV-targeting guide sequence portion
  source 1..22: mol_type = other RNA
cggtatctagaagatctcgtac

SEQ ID NO: 15289 - RNA, 22 nt, synthetic construct
  misc_feature 1..22: note = HBV-targeting guide sequence portion
  source 1..22: mol_type = other RNA
cggtattgtgaggattcttgtc

SEQ ID NO: 15290 - RNA, 22 nt, synthetic construct
  misc_feature 1..22: note = HBV-targeting guide sequence portion
  source 1..22: mol_type = other RNA
cggtccggcagatgagaaggca

SEQ ID NO: 15291 - RNA, 22 nt, synthetic construct
  misc_feature 1..22: note = HBV-targeting guide sequence portion
  source 1..22: mol_type = other RNA
cggtcctagagtatttggtgtc

SEQ ID NO: 15292 - RNA, 22 nt, synthetic construct
  misc_feature 1..22: note = HBV-targeting guide sequence portion
  source 1..22: mol_type = other RNA
cggtcggaacggcaggcagaga

SEQ ID NO: 15293 - RNA, 22 nt, synthetic construct
  misc_feature 1..22: note = HBV-targeting guide sequence portion
  source 1..22: mol_type = other RNA
cggtcgttgacattgcagagag

SEQ ID NO: 15294 - RNA, 22 nt, synthetic construct
  misc_feature 1..22: note = HBV-targeting guide sequence portion
  source 1..22: mol_type = other RNA
cggtctggagcaaacattctcg

SEQ ID NO: 15295 - RNA, 22 nt, synthetic construct
  misc_feature 1..22: note = HBV-targeting guide sequence portion
  source 1..22: mol_type = other RNA
cggtggggtgaaccctagcccg

SEQ ID NO: 15296 - RNA, 22 nt, synthetic construct
  misc_feature 1..22: note = HBV-targeting guide sequence portion
  source 1..22: mol_type = other RNA
cggtggtctccatgcgacgtgc

SEQ ID NO: 15297 - RNA, 22 nt, synthetic construct
  misc_feature 1..22: note = HBV-targeting guide sequence portion
  source 1..22: mol_type = other RNA
cggttaacaggcctattgattg

SEQ ID NO: 15298 - RNA, 22 nt, synthetic construct
  misc_feature 1..22: note = HBV-targeting guide sequence portion
  source 1..22: mol_type = other RNA
cggttgaaattgattatgcctg

SEQ ID NO: 15299 - RNA, 22 nt, synthetic construct
  misc_feature 1..22: note = HBV-targeting guide sequence portion
  source 1..22: mol_type = other RNA
cgtaaaatttcccaccttatga

SEQ ID NO: 15300 - RNA, 22 nt, synthetic construct
  misc_feature 1..22: note = HBV-targeting guide sequence portion
  source 1..22: mol_type = other RNA
cgtaaacaaaggacgtcccgcg

SEQ ID NO: 15301 - RNA, 22 nt, synthetic construct
  misc_feature 1..22: note = HBV-targeting guide sequence portion
  source 1..22: mol_type = other RNA
cgtaaagagaggtgcgccccgt

SEQ ID NO: 15302 - RNA, 22 nt, synthetic construct
  misc_feature 1..22: note = HBV-targeting guide sequence portion
  source 1..22: mol_type = other RNA
cgtacgagatcttctagatacc

SEQ ID NO: 15303 - RNA, 22 nt, synthetic construct
  misc_feature 1..22: note = HBV-targeting guide sequence portion
  source 1..22: mol_type = other RNA
cgtacggaaggaaagaagtcag

SEQ ID NO: 15304 - RNA, 22 nt, synthetic construct
  misc_feature 1..22: note = HBV-targeting guide sequence portion
  source 1..22: mol_type = other RNA
cgtagggctttcccccactgtt

SEQ ID NO: 15305 - RNA, 22 nt, synthetic construct
  misc_feature 1..22: note = HBV-targeting guide sequence portion
  source 1..22: mol_type = other RNA
cgtcaatcttctcgaggattgg

SEQ ID NO: 15306 - RNA, 22 nt, synthetic construct
  misc_feature 1..22: note = HBV-targeting guide sequence portion
  source 1..22: mol_type = other RNA
cgtcccgcgcaggatccagttg

SEQ ID NO: 15307 - RNA, 22 nt, synthetic construct
  misc_feature 1..22: note = HBV-targeting guide sequence portion
  source 1..22: mol_type = other RNA
cgtcccgtcggcgctgaatccc

SEQ ID NO: 15308 - RNA, 22 nt, synthetic construct
  misc_feature 1..22: note = HBV-targeting guide sequence portion
  source 1..22: mol_type = other RNA
cgtccgcgggattcagcgccga

SEQ ID NO: 15309 - RNA, 22 nt, synthetic construct
  misc_feature 1..22: note = HBV-targeting guide sequence portion
  source 1..22: mol_type = other RNA
cgtcctcttctctgcctgccgt

SEQ ID NO: 15310 - RNA, 22 nt, synthetic construct
  misc_feature 1..22: note = HBV-targeting guide sequence portion
  source 1..22: mol_type = other RNA
cgtcctgactggcgattggtag

SEQ ID NO: 15311 - RNA, 22 nt, synthetic construct
  misc_feature 1..22: note = HBV-targeting guide sequence portion
  source 1..22: mol_type = other RNA
cgtcctttgtttacgtcccgtc

SEQ ID NO: 15312 - RNA, 22 nt, synthetic construct
  misc_feature 1..22: note = HBV-targeting guide sequence portion
  source 1..22: mol_type = other RNA
cgtcgcagaagatctcaatctc

SEQ ID NO: 15313 - RNA, 22 nt, synthetic construct
  misc_feature 1..22: note = HBV-targeting guide sequence portion
  source 1..22: mol_type = other RNA
cgtcgcatggagaccaccgtga

SEQ ID NO: 15314 - RNA, 22 nt, synthetic construct
  misc_feature 1..22: note = HBV-targeting guide sequence portion
  source 1..22: mol_type = other RNA
cgtcggcgctgaatcccgcgga

SEQ ID NO: 15315 - RNA, 22 nt, synthetic construct
  misc_feature 1..22: note = HBV-targeting guide sequence portion
  source 1..22: mol_type = other RNA
cgtcgtctaacaacacaagtct

SEQ ID NO: 15316 - RNA, 22 nt, synthetic construct
  misc_feature 1..22: note = HBV-targeting guide sequence portion
  source 1..22: mol_type = other RNA
cgtctaacaacacaagtctccg

SEQ ID NO: 15317 - RNA, 22 nt, synthetic construct
  misc_feature 1..22: note = HBV-targeting guide sequence portion
  source 1..22: mol_type = other RNA
cgtctgcgaggcgagggagttc

SEQ ID NO: 15318 - RNA, 22 nt, synthetic construct
  misc_feature 1..22: note = HBV-targeting guide sequence portion
  source 1..22: mol_type = other RNA
cgtctggccagggatccttgtt

SEQ ID NO: 15319 - RNA, 22 nt, synthetic construct
  misc_feature 1..22: note = HBV-targeting guide sequence portion
  source 1..22: mol_type = other RNA
cgtctgtcctctaattccagga

SEQ ID NO: 15320 - RNA, 22 nt, synthetic construct
  misc_feature 1..22: note = HBV-targeting guide sequence portion
  source 1..22: mol_type = other RNA
cgtctgtgccttctcatctgcc

SEQ ID NO: 15321 - RNA, 22 nt, synthetic construct
  misc_feature 1..22: note = HBV-targeting guide sequence portion
  source 1..22: mol_type = other RNA
cgtcttttctcattaactgtaa

SEQ ID NO: 15322 - RNA, 22 nt, synthetic construct
  misc_feature 1..22: note = HBV-targeting guide sequence portion
  source 1..22: mol_type = other RNA
cgtgaacgcccaccaattcttg

SEQ ID NO: 15323 - RNA, 22 nt, synthetic construct
  misc_feature 1..22: note = HBV-targeting guide sequence portion
  source 1..22: mol_type = other RNA
cgtgcagaggtgaagcgaagtg

SEQ ID NO: 15324 - RNA, 22 nt, synthetic construct
  misc_feature 1..22: note = HBV-targeting guide sequence portion
  source 1..22: mol_type = other RNA
cgtgcaggttctgcagggtccc

SEQ ID NO: 15325 - RNA, 22 nt, synthetic construct
  misc_feature 1..22: note = HBV-targeting guide sequence portion
  source 1..22: mol_type = other RNA
cgtgcggtggggtgaaccctag

SEQ ID NO: 15326 - RNA, 22 nt, synthetic construct
  misc_feature 1..22: note = HBV-targeting guide sequence portion
  source 1..22: mol_type = other RNA
cgtgctggtggttgatgatcct

SEQ ID NO: 15327 - RNA, 22 nt, synthetic construct
  misc_feature 1..22: note = HBV-targeting guide sequence portion
  source 1..22: mol_type = other RNA
cgtggaacctttccggctcctc

SEQ ID NO: 15328 - RNA, 22 nt, synthetic construct
  misc_feature 1..22: note = HBV-targeting guide sequence portion
  source 1..22: mol_type = other RNA
cgtggtcggtcggaacggcagg

SEQ ID NO: 15329 - RNA, 22 nt, synthetic construct
  misc_feature 1..22: note = HBV-targeting guide sequence portion
  source 1..22: mol_type = other RNA
cgtggtggacttctctcaattt

SEQ ID NO: 15330 - RNA, 22 nt, synthetic construct
  misc_feature 1..22: note = HBV-targeting guide sequence portion
  source 1..22: mol_type = other RNA
cgtgtgcacttcgcttcacctc

SEQ ID NO: 15331 - RNA, 22 nt, synthetic construct
  misc_feature 1..22: note = HBV-targeting guide sequence portion
  source 1..22: mol_type = other RNA
cgtgtgtcttggccaaaattcg

SEQ ID NO: 15332 - RNA, 22 nt, synthetic construct
  misc_feature 1..22: note = HBV-targeting guide sequence portion
  source 1..22: mol_type = other RNA
cgtgttacaggcggggttttcc

SEQ ID NO: 15333 - RNA, 22 nt, synthetic construct
  misc_feature 1..22: note = HBV-targeting guide sequence portion
  source 1..22: mol_type = other RNA
cgttcacggtggtctccatgcg

SEQ ID NO: 15334 - RNA, 22 nt, synthetic construct
  misc_feature 1..22: note = HBV-targeting guide sequence portion
  source 1..22: mol_type = other RNA
cgttcccatggctgctaggctg

SEQ ID NO: 15335 - RNA, 22 nt, synthetic construct
  misc_feature 1..22: note = HBV-targeting guide sequence portion
  source 1..22: mol_type = other RNA
cgttccgaccgaccacggggcg

SEQ ID NO: 15336 - RNA, 22 nt, synthetic construct
  misc_feature 1..22: note = HBV-targeting guide sequence portion
  source 1..22: mol_type = other RNA
cgttgacacactttccaatcaa

SEQ ID NO: 15337 - RNA, 22 nt, synthetic construct
  misc_feature 1..22: note = HBV-targeting guide sequence portion
  source 1..22: mol_type = other RNA
cgttgacattgcagagagtcca

SEQ ID NO: 15338 - RNA, 22 nt, synthetic construct
  misc_feature 1..22: note = HBV-targeting guide sequence portion
  source 1..22: mol_type = other RNA
cgttgccaggcaacggccaggt

SEQ ID NO: 15339 - RNA, 22 nt, synthetic construct
  misc_feature 1..22: note = HBV-targeting guide sequence portion
  source 1..22: mol_type = other RNA
cgttgcctggcaacggggtaaa

SEQ ID NO: 15340 - RNA, 22 nt, synthetic construct
  misc_feature 1..22: note = HBV-targeting guide sequence portion
  source 1..22: mol_type = other RNA
cgtttctcttccaaaagtaaga

SEQ ID NO: 15341 - RNA, 22 nt, synthetic construct
  misc_feature 1..22: note = HBV-targeting guide sequence portion
  source 1..22: mol_type = other RNA
cgtttctcttggctcagtttac

SEQ ID NO: 15342 - RNA, 22 nt, synthetic construct
  misc_feature 1..22: note = HBV-targeting guide sequence portion
  source 1..22: mol_type = other RNA
cgttttatcatcttcctcttca

SEQ ID NO: 15343 - RNA, 22 nt, synthetic construct
  misc_feature 1..22: note = HBV-targeting guide sequence portion
  source 1..22: mol_type = other RNA
cgtttttgccttctgacttctt

SEQ ID NO: 15344 - RNA, 22 nt, synthetic construct
  misc_feature 1..22: note = HBV-targeting guide sequence portion
  source 1..22: mol_type = other RNA
ctaaagccacccaaggcacagc

SEQ ID NO: 15345 - RNA, 22 nt, synthetic construct
  misc_feature 1..22: note = HBV-targeting guide sequence portion
  source 1..22: mol_type = other RNA
ctaaagttcagacaactattgt

SEQ ID NO: 15346 - RNA, 22 nt, synthetic construct
  misc_feature 1..22: note = HBV-targeting guide sequence portion
  source 1..22: mol_type = other RNA
ctaaattagtacccacccaggt

SEQ ID NO: 15347 - RNA, 22 nt, synthetic construct
  misc_feature 1..22: note = HBV-targeting guide sequence portion
  source 1..22: mol_type = other RNA
ctaaattcaccaaatacttgcc

SEQ ID NO: 15348 - RNA, 22 nt, synthetic construct
  misc_feature 1..22: note = HBV-targeting guide sequence portion
  source 1..22: mol_type = other RNA
ctaacaaaacaaagagatgggg

SEQ ID NO: 15349 - RNA, 22 nt, synthetic construct
  misc_feature 1..22: note = HBV-targeting guide sequence portion
  source 1..22: mol_type = other RNA
ctaacaacacaagtctccggaa

SEQ ID NO: 15350 - RNA, 22 nt, synthetic construct
  misc_feature 1..22: note = HBV-targeting guide sequence portion
  source 1..22: mol_type = other RNA
ctaacattgagatccccgagat

SEQ ID NO: 15351 - RNA, 22 nt, synthetic construct
  misc_feature 1..22: note = HBV-targeting guide sequence portion
  source 1..22: mol_type = other RNA
ctaagcaggctttcactttttc

SEQ ID NO: 15352 - RNA, 22 nt, synthetic construct
  misc_feature 1..22: note = HBV-targeting guide sequence portion
  source 1..22: mol_type = other RNA
ctaatatacatctacaccaaga

SEQ ID NO: 15353 - RNA, 22 nt, synthetic construct
  misc_feature 1..22: note = HBV-targeting guide sequence portion
  source 1..22: mol_type = other RNA
ctaatcatctcttgttcatgtc

SEQ ID NO: 15354 - RNA, 22 nt, synthetic construct
  misc_feature 1..22: note = HBV-targeting guide sequence portion
  source 1..22: mol_type = other RNA
ctaatctcctcccccaactcct

SEQ ID NO: 15355 - RNA, 22 nt, synthetic construct
  misc_feature 1..22: note = HBV-targeting guide sequence portion
  source 1..22: mol_type = other RNA
ctaatgactctagctacctggg

SEQ ID NO: 15356 - RNA, 22 nt, synthetic construct
  misc_feature 1..22: note = HBV-targeting guide sequence portion
  source 1..22: mol_type = other RNA
ctaattccaggatcatcaacca

SEQ ID NO: 15357 - RNA, 22 nt, synthetic construct
  misc_feature 1..22: note = HBV-targeting guide sequence portion
  source 1..22: mol_type = other RNA
ctaatttagaagatcaagcatc

SEQ ID NO: 15358 - RNA, 22 nt, synthetic construct
  misc_feature 1..22: note = HBV-targeting guide sequence portion
  source 1..22: mol_type = other RNA
ctacaaactgttcacatttttt

SEQ ID NO: 15359 - RNA, 22 nt, synthetic construct
  misc_feature 1..22: note = HBV-targeting guide sequence portion
  source 1..22: mol_type = other RNA
ctacaccaagatattatcaaaa

SEQ ID NO: 15360 - RNA, 22 nt, synthetic construct
  misc_feature 1..22: note = HBV-targeting guide sequence portion
  source 1..22: mol_type = other RNA
ctacagcatggggcagaatctt

SEQ ID NO: 15361 - RNA, 22 nt, synthetic construct
  misc_feature 1..22: note = HBV-targeting guide sequence portion
  source 1..22: mol_type = other RNA
ctacagcctcctagtacaaaga

SEQ ID NO: 15362 - RNA, 22 nt, synthetic construct
  misc_feature 1..22: note = HBV-targeting guide sequence portion
  source 1..22: mol_type = other RNA
ctaccaatcgccagtcaggacg

SEQ ID NO: 15363 - RNA, 22 nt, synthetic construct
  misc_feature 1..22: note = HBV-targeting guide sequence portion
  source 1..22: mol_type = other RNA
ctaccccgctgtctccacctct

SEQ ID NO: 15364 - RNA, 22 nt, synthetic construct
  misc_feature 1..22: note = HBV-targeting guide sequence portion
  source 1..22: mol_type = other RNA
ctaccgtgtgtcttggccaaaa

SEQ ID NO: 15365 - RNA, 22 nt, synthetic construct
  misc_feature 1..22: note = HBV-targeting guide sequence portion
  source 1..22: mol_type = other RNA
ctacctgggtgggtactaattt

SEQ ID NO: 15366 - RNA, 22 nt, synthetic construct
  misc_feature 1..22: note = HBV-targeting guide sequence portion
  source 1..22: mol_type = other RNA
ctaccttgttggcgtctggcca

SEQ ID NO: 15367 - RNA, 22 nt, synthetic construct
  misc_feature 1..22: note = HBV-targeting guide sequence portion
  source 1..22: mol_type = other RNA
ctacgaaccactgaacaaatgg

SEQ ID NO: 15368 - RNA, 22 nt, synthetic construct
  misc_feature 1..22: note = HBV-targeting guide sequence portion
  source 1..22: mol_type = other RNA
ctactaggtccctagatgcttg

SEQ ID NO: 15369 - RNA, 22 nt, synthetic construct
  misc_feature 1..22: note = HBV-targeting guide sequence portion
  source 1..22: mol_type = other RNA
ctactgcctctcacatatcgtc

SEQ ID NO: 15370 - RNA, 22 nt, synthetic construct
  misc_feature 1..22: note = HBV-targeting guide sequence portion
  source 1..22: mol_type = other RNA
ctactgtacctgtctttaaccc

SEQ ID NO: 15371 - RNA, 22 nt, synthetic construct
  misc_feature 1..22: note = HBV-targeting guide sequence portion
  source 1..22: mol_type = other RNA
ctactgtggagttactctcgtt

SEQ ID NO: 15372 - RNA, 22 nt, synthetic construct
  misc_feature 1..22: note = HBV-targeting guide sequence portion
  source 1..22: mol_type = other RNA
ctactgttcaagcctccaagct

SEQ ID NO: 15373 - RNA, 22 nt, synthetic construct
  misc_feature 1..22: note = HBV-targeting guide sequence portion
  source 1..22: mol_type = other RNA
ctagaaaattgagagaagtcca

SEQ ID NO: 15374 - RNA, 22 nt, synthetic construct
  misc_feature 1..22: note = HBV-targeting guide sequence portion
  source 1..22: mol_type = other RNA
ctagaagaagaactccctcgcc

SEQ ID NO: 15375 - RNA, 22 nt, synthetic construct
  misc_feature 1..22: note = HBV-targeting guide sequence portion
  source 1..22: mol_type = other RNA
ctagaagatctcgtacggaagg

SEQ ID NO: 15376 - RNA, 22 nt, synthetic construct
  misc_feature 1..22: note = HBV-targeting guide sequence portion
  source 1..22: mol_type = other RNA
ctagacactatttacacactct

SEQ ID NO: 15377 - RNA, 22 nt, synthetic construct
  misc_feature 1..22: note = HBV-targeting guide sequence portion
  source 1..22: mol_type = other RNA
ctagactcgtggtggacttctc

SEQ ID NO: 15378 - RNA, 22 nt, synthetic construct
  misc_feature 1..22: note = HBV-targeting guide sequence portion
  source 1..22: mol_type = other RNA
ctagactctgcggtattgtgag

SEQ ID NO: 15379 - RNA, 22 nt, synthetic construct
  misc_feature 1..22: note = HBV-targeting guide sequence portion
  source 1..22: mol_type = other RNA
ctagagtatttggtgtcttttg

SEQ ID NO: 15380 - RNA, 22 nt, synthetic construct
  misc_feature 1..22: note = HBV-targeting guide sequence portion
  source 1..22: mol_type = other RNA
ctagagtcattagttctcccca

SEQ ID NO: 15381 - RNA, 22 nt, synthetic construct
  misc_feature 1..22: note = HBV-targeting guide sequence portion
  source 1..22: mol_type = other RNA
ctagataccgccgcagctctgt

SEQ ID NO: 15382 - RNA, 22 nt, synthetic construct
  misc_feature 1..22: note = HBV-targeting guide sequence portion
  source 1..22: mol_type = other RNA
ctagatgcttgatcttctaaat

SEQ ID NO: 15383 - RNA, 22 nt, synthetic construct
  misc_feature 1..22: note = HBV-targeting guide sequence portion
  source 1..22: mol_type = other RNA
ctagatgttctggataataagg

SEQ ID NO: 15384 - RNA, 22 nt, synthetic construct
  misc_feature 1..22: note = HBV-targeting guide sequence portion
  source 1..22: mol_type = other RNA
ctagcagccatgggaacgatgt

SEQ ID NO: 15385 - RNA, 22 nt, synthetic construct
  misc_feature 1..22: note = HBV-targeting guide sequence portion
  source 1..22: mol_type = other RNA
ctagcaggcataatcaatttca

SEQ ID NO: 15386 - RNA, 22 nt, synthetic construct
  misc_feature 1..22: note = HBV-targeting guide sequence portion
  source 1..22: mol_type = other RNA
ctagcccgaatgctccagctcc

SEQ ID NO: 15387 - RNA, 22 nt, synthetic construct
  misc_feature 1..22: note = HBV-targeting guide sequence portion
  source 1..22: mol_type = other RNA
ctagccgcttgttttgctcgca

SEQ ID NO: 15388 - RNA, 22 nt, synthetic construct
  misc_feature 1..22: note = HBV-targeting guide sequence portion
  source 1..22: mol_type = other RNA
ctagctacctgggtgggtacta

SEQ ID NO: 15389 - RNA, 22 nt, synthetic construct
  misc_feature 1..22: note = HBV-targeting guide sequence portion
  source 1..22: mol_type = other RNA
ctaggaatcctgatgtgatgtt

SEQ ID NO: 15390 - RNA, 22 nt, synthetic construct
  misc_feature 1..22: note = HBV-targeting guide sequence portion
  source 1..22: mol_type = other RNA
ctaggacccctgctcgtgttac

SEQ ID NO: 15391 - RNA, 22 nt, synthetic construct
  misc_feature 1..22: note = HBV-targeting guide sequence portion
  source 1..22: mol_type = other RNA
ctaggaccgtttctcttccaaa

SEQ ID NO: 15392 - RNA, 22 nt, synthetic construct
  misc_feature 1..22: note = HBV-targeting guide sequence portion
  source 1..22: mol_type = other RNA
ctaggaggctgtaggcataaat

SEQ ID NO: 15393 - RNA, 22 nt, synthetic construct
  misc_feature 1..22: note = HBV-targeting guide sequence portion
  source 1..22: mol_type = other RNA
ctaggagttccgcagtatggat

SEQ ID NO: 15394 - RNA, 22 nt, synthetic construct
  misc_feature 1..22: note = HBV-targeting guide sequence portion
  source 1..22: mol_type = other RNA
ctaggctgtgctgccaactgga

SEQ ID NO: 15395 - RNA, 22 nt, synthetic construct
  misc_feature 1..22: note = HBV-targeting guide sequence portion
  source 1..22: mol_type = other RNA
ctagggacctagtagtcagtta

SEQ ID NO: 15396 - RNA, 22 nt, synthetic construct
  misc_feature 1..22: note = HBV-targeting guide sequence portion
  source 1..22: mol_type = other RNA
ctaggggacctgcctcgtcgtc

SEQ ID NO: 15397 - RNA, 22 nt, synthetic construct
  misc_feature 1..22: note = HBV-targeting guide sequence portion
  source 1..22: mol_type = other RNA
ctagggggaactaccgtgtgtc

SEQ ID NO: 15398 - RNA, 22 nt, synthetic construct
  misc_feature 1..22: note = HBV-targeting guide sequence portion
  source 1..22: mol_type = other RNA
ctagggttcaccccaccgcacg

SEQ ID NO: 15399 - RNA, 22 nt, synthetic construct
  misc_feature 1..22: note = HBV-targeting guide sequence portion
  source 1..22: mol_type = other RNA
ctaggtccctagatgcttgatc

SEQ ID NO: 15400 - RNA, 22 nt, synthetic construct
  misc_feature 1..22: note = HBV-targeting guide sequence portion
  source 1..22: mol_type = other RNA
ctaggttttatcctaaattcac

SEQ ID NO: 15401 - RNA, 22 nt, synthetic construct
  misc_feature 1..22: note = HBV-targeting guide sequence portion
  source 1..22: mol_type = other RNA
ctagtaaactgagccaagagaa

SEQ ID NO: 15402 - RNA, 22 nt, synthetic construct
  misc_feature 1..22: note = HBV-targeting guide sequence portion
  source 1..22: mol_type = other RNA
ctagtacaaagatcattaatct

SEQ ID NO: 15403 - RNA, 22 nt, synthetic construct
  misc_feature 1..22: note = HBV-targeting guide sequence portion
  source 1..22: mol_type = other RNA
ctagtagtcagttatgtcaaca

SEQ ID NO: 15404 - RNA, 22 nt, synthetic construct
  misc_feature 1..22: note = HBV-targeting guide sequence portion
  source 1..22: mol_type = other RNA
ctagtgccatttgttcagtggt

SEQ ID NO: 15405 - RNA, 22 nt, synthetic construct
  misc_feature 1..22: note = HBV-targeting guide sequence portion
  source 1..22: mol_type = other RNA
ctagttaatcattacttccaaa

SEQ ID NO: 15406 - RNA, 22 nt, synthetic construct
  misc_feature 1..22: note = HBV-targeting guide sequence portion
  source 1..22: mol_type = other RNA
ctagtttggaagtaatgattaa

SEQ ID NO: 15407 - RNA, 22 nt, synthetic construct
  misc_feature 1..22: note = HBV-targeting guide sequence portion
  source 1..22: mol_type = other RNA
ctataagctggaggagtgcgaa

SEQ ID NO: 15408 - RNA, 22 nt, synthetic construct
  misc_feature 1..22: note = HBV-targeting guide sequence portion
  source 1..22: mol_type = other RNA
ctatcaacacttccggagactt

SEQ ID NO: 15409 - RNA, 22 nt, synthetic construct
  misc_feature 1..22: note = HBV-targeting guide sequence portion
  source 1..22: mol_type = other RNA
ctatcaaggtatgtttcccgtc

SEQ ID NO: 15410 - RNA, 22 nt, synthetic construct
  misc_feature 1..22: note = HBV-targeting guide sequence portion
  source 1..22: mol_type = other RNA
ctatcctatcaacacttccgga

SEQ ID NO: 15411 - RNA, 22 nt, synthetic construct
  misc_feature 1..22: note = HBV-targeting guide sequence portion
  source 1..22: mol_type = other RNA
ctatgaccaagccccaaccagt

SEQ ID NO: 15412 - RNA, 22 nt, synthetic construct
  misc_feature 1..22: note = HBV-targeting guide sequence portion
  source 1..22: mol_type = other RNA
ctatgcctcatcttcttgttgg

SEQ ID NO: 15413 - RNA, 22 nt, synthetic construct
  misc_feature 1..22: note = HBV-targeting guide sequence portion
  source 1..22: mol_type = other RNA
ctatggaaggcgggtgttttat

SEQ ID NO: 15414 - RNA, 22 nt, synthetic construct
  misc_feature 1..22: note = HBV-targeting guide sequence portion
  source 1..22: mol_type = other RNA
ctatgggagtgggcctcagccc

SEQ ID NO: 15415 - RNA, 22 nt, synthetic construct
  misc_feature 1..22: note = HBV-targeting guide sequence portion
  source 1..22: mol_type = other RNA
ctatgtatccctcctgttgctg

SEQ ID NO: 15416 - RNA, 22 nt, synthetic construct
  misc_feature 1..22: note = HBV-targeting guide sequence portion
  source 1..22: mol_type = other RNA
ctatgtcattgattgttgggga

SEQ ID NO: 15417 - RNA, 22 nt, synthetic construct
  misc_feature 1..22: note = HBV-targeting guide sequence portion
  source 1..22: mol_type = other RNA
ctatgtgttgacactctcttat

SEQ ID NO: 15418 - RNA, 22 nt, synthetic construct
  misc_feature 1..22: note = HBV-targeting guide sequence portion
  source 1..22: mol_type = other RNA
ctattgattggaaagtgtgtca

SEQ ID NO: 15419 - RNA, 22 nt, synthetic construct
  misc_feature 1..22: note = HBV-targeting guide sequence portion
  source 1..22: mol_type = other RNA
ctattgtggtttcacatttctt

SEQ ID NO: 15420 - RNA, 22 nt, synthetic construct
  misc_feature 1..22: note = HBV-targeting guide sequence portion
  source 1..22: mol_type = other RNA
ctatttacacactctatggaag

SEQ ID NO: 15421 - RNA, 22 nt, synthetic construct
  misc_feature 1..22: note = HBV-targeting guide sequence portion
  source 1..22: mol_type = other RNA
ctcaagatgctgtacagacttg

SEQ ID NO: 15422 - RNA, 22 nt, synthetic construct
  misc_feature 1..22: note = HBV-targeting guide sequence portion
  source 1..22: mol_type = other RNA
ctcaaggaacctctatgtatcc

SEQ ID NO: 15423 - RNA, 22 nt, synthetic construct
  misc_feature 1..22: note = HBV-targeting guide sequence portion
  source 1..22: mol_type = other RNA
ctcaaggtcggtcgttgacatt

SEQ ID NO: 15424 - RNA, 22 nt, synthetic construct
  misc_feature 1..22: note = HBV-targeting guide sequence portion
  source 1..22: mol_type = other RNA
ctcaatcgccgcgtcgcagaag

SEQ ID NO: 15425 - RNA, 22 nt, synthetic construct
  misc_feature 1..22: note = HBV-targeting guide sequence portion
  source 1..22: mol_type = other RNA
ctcaatctcggggatctcaatg

SEQ ID NO: 15426 - RNA, 22 nt, synthetic construct
  misc_feature 1..22: note = HBV-targeting guide sequence portion
  source 1..22: mol_type = other RNA
ctcaatgttagtatcccttgga

SEQ ID NO: 15427 - RNA, 22 nt, synthetic construct
  misc_feature 1..22: note = HBV-targeting guide sequence portion
  source 1..22: mol_type = other RNA
ctcaattttctagggggaacta

SEQ ID NO: 15428 - RNA, 22 nt, synthetic construct
  misc_feature 1..22: note = HBV-targeting guide sequence portion
  source 1..22: mol_type = other RNA
ctcacaataccgcagagtctag

SEQ ID NO: 15429 - RNA, 22 nt, synthetic construct
  misc_feature 1..22: note = HBV-targeting guide sequence portion
  source 1..22: mol_type = other RNA
ctcacatatcgtcaatcttctc

SEQ ID NO: 15430 - RNA, 22 nt, synthetic construct
  misc_feature 1..22: note = HBV-targeting guide sequence portion
  source 1..22: mol_type = other RNA
ctcaccaacctcctgtcctcca

SEQ ID NO: 15431 - RNA, 22 nt, synthetic construct
  misc_feature 1..22: note = HBV-targeting guide sequence portion
  source 1..22: mol_type = other RNA
ctcaccatactgcactcaggca

SEQ ID NO: 15432 - RNA, 22 nt, synthetic construct
  misc_feature 1..22: note = HBV-targeting guide sequence portion
  source 1..22: mol_type = other RNA
ctcactctgggatcttgcagag

SEQ ID NO: 15433 - RNA, 22 nt, synthetic construct
  misc_feature 1..22: note = HBV-targeting guide sequence portion
  source 1..22: mol_type = other RNA
ctcagaggtggagacagcgggg

SEQ ID NO: 15434 - RNA, 22 nt, synthetic construct
  misc_feature 1..22: note = HBV-targeting guide sequence portion
  source 1..22: mol_type = other RNA
ctcagcccgtttctcttggctc

SEQ ID NO: 15435 - RNA, 22 nt, synthetic construct
  misc_feature 1..22: note = HBV-targeting guide sequence portion
  source 1..22: mol_type = other RNA
ctcaggagactccaaggcatcc

SEQ ID NO: 15436 - RNA, 22 nt, synthetic construct
  misc_feature 1..22: note = HBV-targeting guide sequence portion
  source 1..22: mol_type = other RNA
ctcaggcaagcaattctttgct

SEQ ID NO: 15437 - RNA, 22 nt, synthetic construct
  misc_feature 1..22: note = HBV-targeting guide sequence portion
  source 1..22: mol_type = other RNA
ctcaggctcagggcataatgca

SEQ ID NO: 15438 - RNA, 22 nt, synthetic construct
  misc_feature 1..22: note = HBV-targeting guide sequence portion
  source 1..22: mol_type = other RNA
ctcagggcataatgcaaacctt

SEQ ID NO: 15439 - RNA, 22 nt, synthetic construct
  misc_feature 1..22: note = HBV-targeting guide sequence portion
  source 1..22: mol_type = other RNA
ctcagtttactagtgccatttg

SEQ ID NO: 15440 - RNA, 22 nt, synthetic construct
  misc_feature 1..22: note = HBV-targeting guide sequence portion
  source 1..22: mol_type = other RNA
ctcataaggtgggaaattttac

SEQ ID NO: 15441 - RNA, 22 nt, synthetic construct
  misc_feature 1..22: note = HBV-targeting guide sequence portion
  source 1..22: mol_type = other RNA
ctcatatgggcctaaagttcag

SEQ ID NO: 15442 - RNA, 22 nt, synthetic construct
  misc_feature 1..22: note = HBV-targeting guide sequence portion
  source 1..22: mol_type = other RNA
ctcatctgccggaccgtgtgca

SEQ ID NO: 15443 - RNA, 22 nt, synthetic construct
  misc_feature 1..22: note = HBV-targeting guide sequence portion
  source 1..22: mol_type = other RNA
ctcatcttcttgttggttcttc

SEQ ID NO: 15444 - RNA, 22 nt, synthetic construct
  misc_feature 1..22: note = HBV-targeting guide sequence portion
  source 1..22: mol_type = other RNA
ctcattaactgtaagcgggcct

SEQ ID NO: 15445 - RNA, 22 nt, synthetic construct
  misc_feature 1..22: note = HBV-targeting guide sequence portion
  source 1..22: mol_type = other RNA
ctcattctgtgggtcaccatat

SEQ ID NO: 15446 - RNA, 22 nt, synthetic construct
  misc_feature 1..22: note = HBV-targeting guide sequence portion
  source 1..22: mol_type = other RNA
ctcattggaaaacaccctcttt

SEQ ID NO: 15447 - RNA, 22 nt, synthetic construct
  misc_feature 1..22: note = HBV-targeting guide sequence portion
  source 1..22: mol_type = other RNA
ctccaaaagacaccaaatactc

SEQ ID NO: 15448 - RNA, 22 nt, synthetic construct
  misc_feature 1..22: note = HBV-targeting guide sequence portion
  source 1..22: mol_type = other RNA
ctccaaattctttatatgggtc

SEQ ID NO: 15449 - RNA, 22 nt, synthetic construct
  misc_feature 1..22: note = HBV-targeting guide sequence portion
  source 1..22: mol_type = other RNA
ctccaacaatccagattgggac

SEQ ID NO: 15450 - RNA, 22 nt, synthetic construct
  misc_feature 1..22: note = HBV-targeting guide sequence portion
  source 1..22: mol_type = other RNA
ctccaacttgtcctggttatcg

SEQ ID NO: 15451 - RNA, 22 nt, synthetic construct
  misc_feature 1..22: note = HBV-targeting guide sequence portion
  source 1..22: mol_type = other RNA
ctccaagctgtgccttgggtgg

SEQ ID NO: 15452 - RNA, 22 nt, synthetic construct
  misc_feature 1..22: note = HBV-targeting guide sequence portion
  source 1..22: mol_type = other RNA
ctccaaggcatcccgatacaga

SEQ ID NO: 15453 - RNA, 22 nt, synthetic construct
  misc_feature 1..22: note = HBV-targeting guide sequence portion
  source 1..22: mol_type = other RNA
ctccaatcactcaccaacctcc

SEQ ID NO: 15454 - RNA, 22 nt, synthetic construct
  misc_feature 1..22: note = HBV-targeting guide sequence portion
  source 1..22: mol_type = other RNA
ctccacaaccttccaccaaact

SEQ ID NO: 15455 - RNA, 22 nt, synthetic construct
  misc_feature 1..22: note = HBV-targeting guide sequence portion
  source 1..22: mol_type = other RNA
ctccacagtagctccaaattct

SEQ ID NO: 15456 - RNA, 22 nt, synthetic construct
  misc_feature 1..22: note = HBV-targeting guide sequence portion
  source 1..22: mol_type = other RNA
ctccaccccaaaaggcctccgt

SEQ ID NO: 15457 - RNA, 22 nt, synthetic construct
  misc_feature 1..22: note = HBV-targeting guide sequence portion
  source 1..22: mol_type = other RNA
ctccacctctgagaaacactca

SEQ ID NO: 15458 - RNA, 22 nt, synthetic construct
  misc_feature 1..22: note = HBV-targeting guide sequence portion
  source 1..22: mol_type = other RNA
ctccagaccggctgcgagcaaa

SEQ ID NO: 15459 - RNA, 22 nt, synthetic construct
  misc_feature 1..22: note = HBV-targeting guide sequence portion
  source 1..22: mol_type = other RNA
ctccagctcctaccttgttggc

SEQ ID NO: 15460 - RNA, 22 nt, synthetic construct
  misc_feature 1..22: note = HBV-targeting guide sequence portion
  source 1..22: mol_type = other RNA
ctccagcttatagaccaccaaa

SEQ ID NO: 15461 - RNA, 22 nt, synthetic construct
  misc_feature 1..22: note = HBV-targeting guide sequence portion
  source 1..22: mol_type = other RNA
ctccagttcaggaacagtaaac

SEQ ID NO: 15462 - RNA, 22 nt, synthetic construct
  misc_feature 1..22: note = HBV-targeting guide sequence portion
  source 1..22: mol_type = other RNA
ctccatgcgacgtgcagaggtg

SEQ ID NO: 15463 - RNA, 22 nt, synthetic construct
  misc_feature 1..22: note = HBV-targeting guide sequence portion
  source 1..22: mol_type = other RNA
ctccatgttcagcgcagggtcc

SEQ ID NO: 15464 - RNA, 22 nt, synthetic construct
  misc_feature 1..22: note = HBV-targeting guide sequence portion
  source 1..22: mol_type = other RNA
ctcccagtctttaaacaaacag

SEQ ID NO: 15465 - RNA, 22 nt, synthetic construct
  misc_feature 1..22: note = HBV-targeting guide sequence portion
  source 1..22: mol_type = other RNA
ctcccataggaattttccgaaa

SEQ ID NO: 15466 - RNA, 22 nt, synthetic construct
  misc_feature 1..22: note = HBV-targeting guide sequence portion
  source 1..22: mol_type = other RNA
ctccccagcaaagaattgcttg

SEQ ID NO: 15467 - RNA, 22 nt, synthetic construct
  misc_feature 1..22: note = HBV-targeting guide sequence portion
  source 1..22: mol_type = other RNA
ctcccccaactcctcccagtct

SEQ ID NO: 15468 - RNA, 22 nt, synthetic construct
  misc_feature 1..22: note = HBV-targeting guide sequence portion
  source 1..22: mol_type = other RNA
ctccccgtctgtgccttctcat

SEQ ID NO: 15469 - RNA, 22 nt, synthetic construct
  misc_feature 1..22: note = HBV-targeting guide sequence portion
  source 1..22: mol_type = other RNA
ctcccgcaaatatacatcgttc

SEQ ID NO: 15470 - RNA, 22 nt, synthetic construct
  misc_feature 1..22: note = HBV-targeting guide sequence portion
  source 1..22: mol_type = other RNA
ctcccggttaacaggcctattg

SEQ ID NO: 15471 - RNA, 22 nt, synthetic construct
  misc_feature 1..22: note = HBV-targeting guide sequence portion
  source 1..22: mol_type = other RNA
ctccctcgcctcgcagacgaag

SEQ ID NO: 15472 - RNA, 22 nt, synthetic construct
  misc_feature 1..22: note = HBV-targeting guide sequence portion
  source 1..22: mol_type = other RNA
ctccctgctggtggctccagtt

SEQ ID NO: 15473 - RNA, 22 nt, synthetic construct
  misc_feature 1..22: note = HBV-targeting guide sequence portion
  source 1..22: mol_type = other RNA
ctccggaagtgttgataggata

SEQ ID NO: 15474 - RNA, 22 nt, synthetic construct
  misc_feature 1..22: note = HBV-targeting guide sequence portion
  source 1..22: mol_type = other RNA
ctccgtgcggtggggtgaaccc

SEQ ID NO: 15475 - RNA, 22 nt, synthetic construct
  misc_feature 1..22: note = HBV-targeting guide sequence portion
  source 1..22: mol_type = other RNA
ctcctaccttgttggcgtctgg

SEQ ID NO: 15476 - RNA, 22 nt, synthetic construct
  misc_feature 1..22: note = HBV-targeting guide sequence portion
  source 1..22: mol_type = other RNA
ctcctagccgcttgttttgctc

SEQ ID NO: 15477 - RNA, 22 nt, synthetic construct
  misc_feature 1..22: note = HBV-targeting guide sequence portion
  source 1..22: mol_type = other RNA
ctcctagtacaaagatcattaa

SEQ ID NO: 15478 - RNA, 22 nt, synthetic construct
  misc_feature 1..22: note = HBV-targeting guide sequence portion
  source 1..22: mol_type = other RNA
ctcctccagcttatagaccacc

SEQ ID NO: 15479 - RNA, 22 nt, synthetic construct
  misc_feature 1..22: note = HBV-targeting guide sequence portion
  source 1..22: mol_type = other RNA
ctcctcccagtctttaaacaaa

SEQ ID NO: 15480 - RNA, 22 nt, synthetic construct
  misc_feature 1..22: note = HBV-targeting guide sequence portion
  source 1..22: mol_type = other RNA
ctcctcccccaactcctcccag

SEQ ID NO: 15481 - RNA, 22 nt, synthetic construct
  misc_feature 1..22: note = HBV-targeting guide sequence portion
  source 1..22: mol_type = other RNA
ctcctctgccgatccatactgc

SEQ ID NO: 15482 - RNA, 22 nt, synthetic construct
  misc_feature 1..22: note = HBV-targeting guide sequence portion
  source 1..22: mol_type = other RNA
ctcctgagcattgttcacctca

SEQ ID NO: 15483 - RNA, 22 nt, synthetic construct
  misc_feature 1..22: note = HBV-targeting guide sequence portion
  source 1..22: mol_type = other RNA
ctcctgcctctaccaatcgcca

SEQ ID NO: 15484 - RNA, 22 nt, synthetic construct
  misc_feature 1..22: note = HBV-targeting guide sequence portion
  source 1..22: mol_type = other RNA
ctcctgctcaaggaacctctat

SEQ ID NO: 15485 - RNA, 22 nt, synthetic construct
  misc_feature 1..22: note = HBV-targeting guide sequence portion
  source 1..22: mol_type = other RNA
ctcctgtcctccaacttgtcct

SEQ ID NO: 15486 - RNA, 22 nt, synthetic construct
  misc_feature 1..22: note = HBV-targeting guide sequence portion
  source 1..22: mol_type = other RNA
ctcctgttgctgtacaaaacct

SEQ ID NO: 15487 - RNA, 22 nt, synthetic construct
  misc_feature 1..22: note = HBV-targeting guide sequence portion
  source 1..22: mol_type = other RNA
ctcgagaagattgacgatatgt

SEQ ID NO: 15488 - RNA, 22 nt, synthetic construct
  misc_feature 1..22: note = HBV-targeting guide sequence portion
  source 1..22: mol_type = other RNA
ctcgagatgggtcgtccgcggg

SEQ ID NO: 15489 - RNA, 22 nt, synthetic construct
  misc_feature 1..22: note = HBV-targeting guide sequence portion
  source 1..22: mol_type = other RNA
ctcgaggattggggaccctgcg

SEQ ID NO: 15490 - RNA, 22 nt, synthetic construct
  misc_feature 1..22: note = HBV-targeting guide sequence portion
  source 1..22: mol_type = other RNA
ctcgaggccgcttggggccctg

SEQ ID NO: 15491 - RNA, 22 nt, synthetic construct
  misc_feature 1..22: note = HBV-targeting guide sequence portion
  source 1..22: mol_type = other RNA
ctcgcagacgaagatctcaatc

SEQ ID NO: 15492 - RNA, 22 nt, synthetic construct
  misc_feature 1..22: note = HBV-targeting guide sequence portion
  source 1..22: mol_type = other RNA
ctcgcagccggtctggagcaaa

SEQ ID NO: 15493 - RNA, 22 nt, synthetic construct
  misc_feature 1..22: note = HBV-targeting guide sequence portion
  source 1..22: mol_type = other RNA
ctcgcctcgcagacgaagatct

SEQ ID NO: 15494 - RNA, 22 nt, synthetic construct
  misc_feature 1..22: note = HBV-targeting guide sequence portion
  source 1..22: mol_type = other RNA
ctcgggactgacaactctgttg

SEQ ID NO: 15495 - RNA, 22 nt, synthetic construct
  misc_feature 1..22: note = HBV-targeting guide sequence portion
  source 1..22: mol_type = other RNA
ctcggggatctcaatgttagta

SEQ ID NO: 15496 - RNA, 22 nt, synthetic construct
  misc_feature 1..22: note = HBV-targeting guide sequence portion
  source 1..22: mol_type = other RNA
ctcgtacggaaggaaagaagtc

SEQ ID NO: 15497 - RNA, 22 nt, synthetic construct
  misc_feature 1..22: note = HBV-targeting guide sequence portion
  source 1..22: mol_type = other RNA
ctcgtcgtctaacaacacaagt

SEQ ID NO: 15498 - RNA, 22 nt, synthetic construct
  misc_feature 1..22: note = HBV-targeting guide sequence portion
  source 1..22: mol_type = other RNA
ctcgtggtggacttctctcaat

SEQ ID NO: 15499 - RNA, 22 nt, synthetic construct
  misc_feature 1..22: note = HBV-targeting guide sequence portion
  source 1..22: mol_type = other RNA
ctcgtgttacaggcggggtttt

SEQ ID NO: 15500 - RNA, 22 nt, synthetic construct
  misc_feature 1..22: note = HBV-targeting guide sequence portion
  source 1..22: mol_type = other RNA
ctcgtttttgccttctgacttc

SEQ ID NO: 15501 - RNA, 22 nt, synthetic construct
  misc_feature 1..22: note = HBV-targeting guide sequence portion
  source 1..22: mol_type = other RNA
ctctaattccaggatcatcaac

SEQ ID NO: 15502 - RNA, 22 nt, synthetic construct
  misc_feature 1..22: note = HBV-targeting guide sequence portion
  source 1..22: mol_type = other RNA
ctctaccaatcgccagtcagga

SEQ ID NO: 15503 - RNA, 22 nt, synthetic construct
  misc_feature 1..22: note = HBV-targeting guide sequence portion
  source 1..22: mol_type = other RNA
ctctagctacctgggtgggtac

SEQ ID NO: 15504 - RNA, 22 nt, synthetic construct
  misc_feature 1..22: note = HBV-targeting guide sequence portion
  source 1..22: mol_type = other RNA
ctctaggaccgtttctcttcca

SEQ ID NO: 15505 - RNA, 22 nt, synthetic construct
  misc_feature 1..22: note = HBV-targeting guide sequence portion
  source 1..22: mol_type = other RNA
ctctatggaaggcgggtgtttt

SEQ ID NO: 15506 - RNA, 22 nt, synthetic construct
  misc_feature 1..22: note = HBV-targeting guide sequence portion
  source 1..22: mol_type = other RNA
ctctatgtatccctcctgttgc

SEQ ID NO: 15507 - RNA, 22 nt, synthetic construct
  misc_feature 1..22: note = HBV-targeting guide sequence portion
  source 1..22: mol_type = other RNA
ctctcaattttctagggggaac

SEQ ID NO: 15508 - RNA, 22 nt, synthetic construct
  misc_feature 1..22: note = HBV-targeting guide sequence portion
  source 1..22: mol_type = other RNA
ctctcacatatcgtcaatcttc

SEQ ID NO: 15509 - RNA, 22 nt, synthetic construct
  misc_feature 1..22: note = HBV-targeting guide sequence portion
  source 1..22: mol_type = other RNA
ctctcactctgggatcttgcag

SEQ ID NO: 15510 - RNA, 22 nt, synthetic construct
  misc_feature 1..22: note = HBV-targeting guide sequence portion
  source 1..22: mol_type = other RNA
ctctcccgcaaatatacatcgt

SEQ ID NO: 15511 - RNA, 22 nt, synthetic construct
  misc_feature 1..22: note = HBV-targeting guide sequence portion
  source 1..22: mol_type = other RNA
ctctcgtttttgccttctgact

SEQ ID NO: 15512 - RNA, 22 nt, synthetic construct
  misc_feature 1..22: note = HBV-targeting guide sequence portion
  source 1..22: mol_type = other RNA
ctctctgcaatgtcaacgaccg

SEQ ID NO: 15513 - RNA, 22 nt, synthetic construct
  misc_feature 1..22: note = HBV-targeting guide sequence portion
  source 1..22: mol_type = other RNA
ctctcttatataaaacacccgc

SEQ ID NO: 15514 - RNA, 22 nt, synthetic construct
  misc_feature 1..22: note = HBV-targeting guide sequence portion
  source 1..22: mol_type = other RNA
ctctctttacgcggactccccg

SEQ ID NO: 15515 - RNA, 22 nt, synthetic construct
  misc_feature 1..22: note = HBV-targeting guide sequence portion
  source 1..22: mol_type = other RNA
ctctgaaggctgggtccaactg

SEQ ID NO: 15516 - RNA, 22 nt, synthetic construct
  misc_feature 1..22: note = HBV-targeting guide sequence portion
  source 1..22: mol_type = other RNA
ctctgagaaacactcatcctca

SEQ ID NO: 15517 - RNA, 22 nt, synthetic construct
  misc_feature 1..22: note = HBV-targeting guide sequence portion
  source 1..22: mol_type = other RNA
ctctgcaagatcccagagtgag

SEQ ID NO: 15518 - RNA, 22 nt, synthetic construct
  misc_feature 1..22: note = HBV-targeting guide sequence portion
  source 1..22: mol_type = other RNA
ctctgcaatgtcaacgaccgac

SEQ ID NO: 15519 - RNA, 22 nt, synthetic construct
  misc_feature 1..22: note = HBV-targeting guide sequence portion
  source 1..22: mol_type = other RNA
ctctgcacgtcgcatggagacc

SEQ ID NO: 15520 - RNA, 22 nt, synthetic construct
  misc_feature 1..22: note = HBV-targeting guide sequence portion
  source 1..22: mol_type = other RNA
ctctgccgatccatactgcgga

SEQ ID NO: 15521 - RNA, 22 nt, synthetic construct
  misc_feature 1..22: note = HBV-targeting guide sequence portion
  source 1..22: mol_type = other RNA
ctctgcctaatcatctcttgtt

SEQ ID NO: 15522 - RNA, 22 nt, synthetic construct
  misc_feature 1..22: note = HBV-targeting guide sequence portion
  source 1..22: mol_type = other RNA
ctctgcctgccgttccgaccga

SEQ ID NO: 15523 - RNA, 22 nt, synthetic construct
  misc_feature 1..22: note = HBV-targeting guide sequence portion
  source 1..22: mol_type = other RNA
ctctgcggtattgtgaggattc

SEQ ID NO: 15524 - RNA, 22 nt, synthetic construct
  misc_feature 1..22: note = HBV-targeting guide sequence portion
  source 1..22: mol_type = other RNA
ctctgggatcttgcagagtttg

SEQ ID NO: 15525 - RNA, 22 nt, synthetic construct
  misc_feature 1..22: note = HBV-targeting guide sequence portion
  source 1..22: mol_type = other RNA
ctctgggattctttcccgacca

SEQ ID NO: 15526 - RNA, 22 nt, synthetic construct
  misc_feature 1..22: note = HBV-targeting guide sequence portion
  source 1..22: mol_type = other RNA
ctctgtatcgggatgccttgga

SEQ ID NO: 15527 - RNA, 22 nt, synthetic construct
  misc_feature 1..22: note = HBV-targeting guide sequence portion
  source 1..22: mol_type = other RNA
ctctgttgtcctctcccgcaaa

SEQ ID NO: 15528 - RNA, 22 nt, synthetic construct
  misc_feature 1..22: note = HBV-targeting guide sequence portion
  source 1..22: mol_type = other RNA
ctcttaatttcatgggctatgt

SEQ ID NO: 15529 - RNA, 22 nt, synthetic construct
  misc_feature 1..22: note = HBV-targeting guide sequence portion
  source 1..22: mol_type = other RNA
ctcttatataaaacacccgcct

SEQ ID NO: 15530 - RNA, 22 nt, synthetic construct
  misc_feature 1..22: note = HBV-targeting guide sequence portion
  source 1..22: mol_type = other RNA
ctcttatgtaagaccttgggca

SEQ ID NO: 15531 - RNA, 22 nt, synthetic construct
  misc_feature 1..22: note = HBV-targeting guide sequence portion
  source 1..22: mol_type = other RNA
ctcttcatcctgctgctatgcc

SEQ ID NO: 15532 - RNA, 22 nt, synthetic construct
  misc_feature 1..22: note = HBV-targeting guide sequence portion
  source 1..22: mol_type = other RNA
ctcttccaaaagtaagacaaga

SEQ ID NO: 15533 - RNA, 22 nt, synthetic construct
  misc_feature 1..22: note = HBV-targeting guide sequence portion
  source 1..22: mol_type = other RNA
ctcttctctgcctgccgttccg

SEQ ID NO: 15534 - RNA, 22 nt, synthetic construct
  misc_feature 1..22: note = HBV-targeting guide sequence portion
  source 1..22: mol_type = other RNA
ctcttggactctctgcaatgtc

SEQ ID NO: 15535 - RNA, 22 nt, synthetic construct
  misc_feature 1..22: note = HBV-targeting guide sequence portion
  source 1..22: mol_type = other RNA
ctcttggctcagtttactagtg

SEQ ID NO: 15536 - RNA, 22 nt, synthetic construct
  misc_feature 1..22: note = HBV-targeting guide sequence portion
  source 1..22: mol_type = other RNA
ctcttgttcatgtcctactgtt

SEQ ID NO: 15537 - RNA, 22 nt, synthetic construct
  misc_feature 1..22: note = HBV-targeting guide sequence portion
  source 1..22: mol_type = other RNA
ctcttgttcccaagaatatggt

SEQ ID NO: 15538 - RNA, 22 nt, synthetic construct
  misc_feature 1..22: note = HBV-targeting guide sequence portion
  source 1..22: mol_type = other RNA
ctctttacgcggactccccgtc

SEQ ID NO: 15539 - RNA, 22 nt, synthetic construct
  misc_feature 1..22: note = HBV-targeting guide sequence portion
  source 1..22: mol_type = other RNA
ctctttgttttgttagggttta

SEQ ID NO: 15540 - RNA, 22 nt, synthetic construct
  misc_feature 1..22: note = HBV-targeting guide sequence portion
  source 1..22: mol_type = other RNA
ctcttttcctaatatacatcta

SEQ ID NO: 15541 - RNA, 22 nt, synthetic construct
  misc_feature 1..22: note = HBV-targeting guide sequence portion
  source 1..22: mol_type = other RNA
ctgaaacattctttgattttgt

SEQ ID NO: 15542 - RNA, 22 nt, synthetic construct
  misc_feature 1..22: note = HBV-targeting guide sequence portion
  source 1..22: mol_type = other RNA
ctgaaagccaaacagtggggga

SEQ ID NO: 15543 - RNA, 22 nt, synthetic construct
  misc_feature 1..22: note = HBV-targeting guide sequence portion
  source 1..22: mol_type = other RNA
ctgaacaaatggcactagtaaa

SEQ ID NO: 15544 - RNA, 22 nt, synthetic construct
  misc_feature 1..22: note = HBV-targeting guide sequence portion
  source 1..22: mol_type = other RNA
ctgaacatggagaacatcacat

SEQ ID NO: 15545 - RNA, 22 nt, synthetic construct
  misc_feature 1..22: note = HBV-targeting guide sequence portion
  source 1..22: mol_type = other RNA
ctgaacctttaccccgttgcca

SEQ ID NO: 15546 - RNA, 22 nt, synthetic construct
  misc_feature 1..22: note = HBV-targeting guide sequence portion
  source 1..22: mol_type = other RNA
ctgaactggagccaccagcagg

SEQ ID NO: 15547 - RNA, 22 nt, synthetic construct
  misc_feature 1..22: note = HBV-targeting guide sequence portion
  source 1..22: mol_type = other RNA
ctgaactttaggcccatatgag

SEQ ID NO: 15548 - RNA, 22 nt, synthetic construct
  misc_feature 1..22: note = HBV-targeting guide sequence portion
  source 1..22: mol_type = other RNA
ctgaaggctgggtccaactggt

SEQ ID NO: 15549 - RNA, 22 nt, synthetic construct
  misc_feature 1..22: note = HBV-targeting guide sequence portion
  source 1..22: mol_type = other RNA
ctgaatcccgcggacgacccat

SEQ ID NO: 15550 - RNA, 22 nt, synthetic construct
  misc_feature 1..22: note = HBV-targeting guide sequence portion
  source 1..22: mol_type = other RNA
ctgacaactctgttgtcctctc

SEQ ID NO: 15551 - RNA, 22 nt, synthetic construct
  misc_feature 1..22: note = HBV-targeting guide sequence portion
  source 1..22: mol_type = other RNA
ctgactactaggtccctagatg

SEQ ID NO: 15552 - RNA, 22 nt, synthetic construct
  misc_feature 1..22: note = HBV-targeting guide sequence portion
  source 1..22: mol_type = other RNA
ctgactggcgattggtagaggc

SEQ ID NO: 15553 - RNA, 22 nt, synthetic construct
  misc_feature 1..22: note = HBV-targeting guide sequence portion
  source 1..22: mol_type = other RNA
ctgacttctttccttccgtacg

SEQ ID NO: 15554 - RNA, 22 nt, synthetic construct
  misc_feature 1..22: note = HBV-targeting guide sequence portion
  source 1..22: mol_type = other RNA
ctgagaaacactcatcctcagg

SEQ ID NO: 15555 - RNA, 22 nt, synthetic construct
  misc_feature 1..22: note = HBV-targeting guide sequence portion
  source 1..22: mol_type = other RNA
ctgagcattgttcacctcacca

SEQ ID NO: 15556 - RNA, 22 nt, synthetic construct
  misc_feature 1..22: note = HBV-targeting guide sequence portion
  source 1..22: mol_type = other RNA
ctgagccaagagaaacgggctg

SEQ ID NO: 15557 - RNA, 22 nt, synthetic construct
  misc_feature 1..22: note = HBV-targeting guide sequence portion
  source 1..22: mol_type = other RNA
ctgagcctgagggctccacccc

SEQ ID NO: 15558 - RNA, 22 nt, synthetic construct
  misc_feature 1..22: note = HBV-targeting guide sequence portion
  source 1..22: mol_type = other RNA
ctgaggatgagtgtttctcaga

SEQ ID NO: 15559 - RNA, 22 nt, synthetic construct
  misc_feature 1..22: note = HBV-targeting guide sequence portion
  source 1..22: mol_type = other RNA
ctgaggcccactcccataggaa

SEQ ID NO: 15560 - RNA, 22 nt, synthetic construct
  misc_feature 1..22: note = HBV-targeting guide sequence portion
  source 1..22: mol_type = other RNA
ctgagggctccaccccaaaagg

SEQ ID NO: 15561 - RNA, 22 nt, synthetic construct
  misc_feature 1..22: note = HBV-targeting guide sequence portion
  source 1..22: mol_type = other RNA
ctgagtgcagtatggtgaggtg

SEQ ID NO: 15562 - RNA, 22 nt, synthetic construct
  misc_feature 1..22: note = HBV-targeting guide sequence portion
  source 1..22: mol_type = other RNA
ctgatgcaacccccactggttg

SEQ ID NO: 15563 - RNA, 22 nt, synthetic construct
  misc_feature 1..22: note = HBV-targeting guide sequence portion
  source 1..22: mol_type = other RNA
ctgatggcctatgaccaagccc

SEQ ID NO: 15564 - RNA, 22 nt, synthetic construct
  misc_feature 1..22: note = HBV-targeting guide sequence portion
  source 1..22: mol_type = other RNA
ctgatgtgatgttctccatgtt

SEQ ID NO: 15565 - RNA, 22 nt, synthetic construct
  misc_feature 1..22: note = HBV-targeting guide sequence portion
  source 1..22: mol_type = other RNA
ctgcaagatcccagagtgagag

SEQ ID NO: 15566 - RNA, 22 nt, synthetic construct
  misc_feature 1..22: note = HBV-targeting guide sequence portion
  source 1..22: mol_type = other RNA
ctgcaatgtcaacgaccgacct

SEQ ID NO: 15567 - RNA, 22 nt, synthetic construct
  misc_feature 1..22: note = HBV-targeting guide sequence portion
  source 1..22: mol_type = other RNA
ctgcacctgtattcccatccca

SEQ ID NO: 15568 - RNA, 22 nt, synthetic construct
  misc_feature 1..22: note = HBV-targeting guide sequence portion
  source 1..22: mol_type = other RNA
ctgcacgactcctgctcaagga

SEQ ID NO: 15569 - RNA, 22 nt, synthetic construct
  misc_feature 1..22: note = HBV-targeting guide sequence portion
  source 1..22: mol_type = other RNA
ctgcacgtcgcatggagaccac

SEQ ID NO: 15570 - RNA, 22 nt, synthetic construct
  misc_feature 1..22: note = HBV-targeting guide sequence portion
  source 1..22: mol_type = other RNA
ctgcactcaggcaagcaattct

SEQ ID NO: 15571 - RNA, 22 nt, synthetic construct
  misc_feature 1..22: note = HBV-targeting guide sequence portion
  source 1..22: mol_type = other RNA
ctgcagaacctgcacgactcct

SEQ ID NO: 15572 - RNA, 22 nt, synthetic construct
  misc_feature 1..22: note = HBV-targeting guide sequence portion
  source 1..22: mol_type = other RNA
ctgcagggtcccgtgctggtgg

SEQ ID NO: 15573 - RNA, 22 nt, synthetic construct
  misc_feature 1..22: note = HBV-targeting guide sequence portion
  source 1..22: mol_type = other RNA
ctgcatggcctgaggatgagtg

SEQ ID NO: 15574 - RNA, 22 nt, synthetic construct
  misc_feature 1..22: note = HBV-targeting guide sequence portion
  source 1..22: mol_type = other RNA
ctgccaactggatcctgcgcgg

SEQ ID NO: 15575 - RNA, 22 nt, synthetic construct
  misc_feature 1..22: note = HBV-targeting guide sequence portion
  source 1..22: mol_type = other RNA
ctgccccatgctgtagctcttg

SEQ ID NO: 15576 - RNA, 22 nt, synthetic construct
  misc_feature 1..22: note = HBV-targeting guide sequence portion
  source 1..22: mol_type = other RNA
ctgccccttttacacaatgtgg

SEQ ID NO: 15577 - RNA, 22 nt, synthetic construct
  misc_feature 1..22: note = HBV-targeting guide sequence portion
  source 1..22: mol_type = other RNA
ctgccgatccatactgcggaac

SEQ ID NO: 15578 - RNA, 22 nt, synthetic construct
  misc_feature 1..22: note = HBV-targeting guide sequence portion
  source 1..22: mol_type = other RNA
ctgccggaccgtgtgcacttcg

SEQ ID NO: 15579 - RNA, 22 nt, synthetic construct
  misc_feature 1..22: note = HBV-targeting guide sequence portion
  source 1..22: mol_type = other RNA
ctgccgtcctgactggcgattg

SEQ ID NO: 15580 - RNA, 22 nt, synthetic construct
  misc_feature 1..22: note = HBV-targeting guide sequence portion
  source 1..22: mol_type = other RNA
ctgccgttccgaccgaccacgg

SEQ ID NO: 15581 - RNA, 22 nt, synthetic construct
  misc_feature 1..22: note = HBV-targeting guide sequence portion
  source 1..22: mol_type = other RNA
ctgcctaatcatctcttgttca

SEQ ID NO: 15582 - RNA, 22 nt, synthetic construct
  misc_feature 1..22: note = HBV-targeting guide sequence portion
  source 1..22: mol_type = other RNA
ctgcctcgtcgtctaacaacac

SEQ ID NO: 15583 - RNA, 22 nt, synthetic construct
  misc_feature 1..22: note = HBV-targeting guide sequence portion
  source 1..22: mol_type = other RNA
ctgcctctaccaatcgccagtc

SEQ ID NO: 15584 - RNA, 22 nt, synthetic construct
  misc_feature 1..22: note = HBV-targeting guide sequence portion
  source 1..22: mol_type = other RNA
ctgcctctcacatatcgtcaat

SEQ ID NO: 15585 - RNA, 22 nt, synthetic construct
  misc_feature 1..22: note = HBV-targeting guide sequence portion
  source 1..22: mol_type = other RNA
ctgcctgccgttccgaccgacc

SEQ ID NO: 15586 - RNA, 22 nt, synthetic construct
  misc_feature 1..22: note = HBV-targeting guide sequence portion
  source 1..22: mol_type = other RNA
ctgcgaattttggccaagacac

SEQ ID NO: 15587 - RNA, 22 nt, synthetic construct
  misc_feature 1..22: note = HBV-targeting guide sequence portion
  source 1..22: mol_type = other RNA
ctgcgacgcggcgattgagatc

SEQ ID NO: 15588 - RNA, 22 nt, synthetic construct
  misc_feature 1..22: note = HBV-targeting guide sequence portion
  source 1..22: mol_type = other RNA
ctgcgagcaaaacaagcggcta

SEQ ID NO: 15589 - RNA, 22 nt, synthetic construct
  misc_feature 1..22: note = HBV-targeting guide sequence portion
  source 1..22: mol_type = other RNA
ctgcgaggcgagggagttcttc

SEQ ID NO: 15590 - RNA, 22 nt, synthetic construct
  misc_feature 1..22: note = HBV-targeting guide sequence portion
  source 1..22: mol_type = other RNA
ctgcgcaccagcaccatgcaac

SEQ ID NO: 15591 - RNA, 22 nt, synthetic construct
  misc_feature 1..22: note = HBV-targeting guide sequence portion
  source 1..22: mol_type = other RNA
ctgcgcgggacgtcctttgttt

SEQ ID NO: 15592 - RNA, 22 nt, synthetic construct
  misc_feature 1..22: note = HBV-targeting guide sequence portion
  source 1..22: mol_type = other RNA
ctgcgctgaacatggagaacat

SEQ ID NO: 15593 - RNA, 22 nt, synthetic construct
  misc_feature 1..22: note = HBV-targeting guide sequence portion
  source 1..22: mol_type = other RNA
ctgcggaactcctagccgcttg

SEQ ID NO: 15594 - RNA, 22 nt, synthetic construct
  misc_feature 1..22: note = HBV-targeting guide sequence portion
  source 1..22: mol_type = other RNA
ctgcggcggtatctagaagatc

SEQ ID NO: 15595 - RNA, 22 nt, synthetic construct
  misc_feature 1..22: note = HBV-targeting guide sequence portion
  source 1..22: mol_type = other RNA
ctgcggcgttttatcatcttcc

SEQ ID NO: 15596 - RNA, 22 nt, synthetic construct
  misc_feature 1..22: note = HBV-targeting guide sequence portion
  source 1..22: mol_type = other RNA
ctgcggtattgtgaggattctt

SEQ ID NO: 15597 - RNA, 22 nt, synthetic construct
  misc_feature 1..22: note = HBV-targeting guide sequence portion
  source 1..22: mol_type = other RNA
ctgctaggctgtgctgccaact

SEQ ID NO: 15598 - RNA, 22 nt, synthetic construct
  misc_feature 1..22: note = HBV-targeting guide sequence portion
  source 1..22: mol_type = other RNA
ctgctaggttttatcctaaatt

SEQ ID NO: 15599 - RNA, 22 nt, synthetic construct
  misc_feature 1..22: note = HBV-targeting guide sequence portion
  source 1..22: mol_type = other RNA
ctgctatgcctcatcttcttgt

SEQ ID NO: 15600 - RNA, 22 nt, synthetic construct
  misc_feature 1..22: note = HBV-targeting guide sequence portion
  source 1..22: mol_type = other RNA
ctgctcaaggaacctctatgta

SEQ ID NO: 15601 - RNA, 22 nt, synthetic construct
  misc_feature 1..22: note = HBV-targeting guide sequence portion
  source 1..22: mol_type = other RNA
ctgctcgtgttacaggcggggt

SEQ ID NO: 15602 - RNA, 22 nt, synthetic construct
  misc_feature 1..22: note = HBV-targeting guide sequence portion
  source 1..22: mol_type = other RNA
ctgctgctatgcctcatcttct

SEQ ID NO: 15603 - RNA, 22 nt, synthetic construct
  misc_feature 1..22: note = HBV-targeting guide sequence portion
  source 1..22: mol_type = other RNA
ctgctggtggctccagttcagg

SEQ ID NO: 15604 - RNA, 22 nt, synthetic construct
  misc_feature 1..22: note = HBV-targeting guide sequence portion
  source 1..22: mol_type = other RNA
ctgcttagattgaatacatgca

SEQ ID NO: 15605 - RNA, 22 nt, synthetic construct
  misc_feature 1..22: note = HBV-targeting guide sequence portion
  source 1..22: mol_type = other RNA
ctgctttaatgcccttgtatgc

SEQ ID NO: 15606 - RNA, 22 nt, synthetic construct
  misc_feature 1..22: note = HBV-targeting guide sequence portion
  source 1..22: mol_type = other RNA
ctggaattagaggacagacggg

SEQ ID NO: 15607 - RNA, 22 nt, synthetic construct
  misc_feature 1..22: note = HBV-targeting guide sequence portion
  source 1..22: mol_type = other RNA
ctggactatcaaggtatgtttc

SEQ ID NO: 15608 - RNA, 22 nt, synthetic construct
  misc_feature 1..22: note = HBV-targeting guide sequence portion
  source 1..22: mol_type = other RNA
ctggagcaaacattctcgggac

SEQ ID NO: 15609 - RNA, 22 nt, synthetic construct
  misc_feature 1..22: note = HBV-targeting guide sequence portion
  source 1..22: mol_type = other RNA
ctggagcattcgggctagggtt

SEQ ID NO: 15610 - RNA, 22 nt, synthetic construct
  misc_feature 1..22: note = HBV-targeting guide sequence portion
  source 1..22: mol_type = other RNA
ctggagccaccagcagggagat

SEQ ID NO: 15611 - RNA, 22 nt, synthetic construct
  misc_feature 1..22: note = HBV-targeting guide sequence portion
  source 1..22: mol_type = other RNA
ctggaggagtgcgaatccacac

SEQ ID NO: 15612 - RNA, 22 nt, synthetic construct
  misc_feature 1..22: note = HBV-targeting guide sequence portion
  source 1..22: mol_type = other RNA
ctggataataaggtttaatacc

SEQ ID NO: 15613 - RNA, 22 nt, synthetic construct
  misc_feature 1..22: note = HBV-targeting guide sequence portion
  source 1..22: mol_type = other RNA
ctggatcctgcgcgggacgtcc

SEQ ID NO: 15614 - RNA, 22 nt, synthetic construct
  misc_feature 1..22: note = HBV-targeting guide sequence portion
  source 1..22: mol_type = other RNA
ctggatgtgtctgcggcgtttt

SEQ ID NO: 15615 - RNA, 22 nt, synthetic construct
  misc_feature 1..22: note = HBV-targeting guide sequence portion
  source 1..22: mol_type = other RNA
ctggattgttggagtttgctct

SEQ ID NO: 15616 - RNA, 22 nt, synthetic construct
  misc_feature 1..22: note = HBV-targeting guide sequence portion
  source 1..22: mol_type = other RNA
ctggcaacggggtaaaggttca

SEQ ID NO: 15617 - RNA, 22 nt, synthetic construct
  misc_feature 1..22: note = HBV-targeting guide sequence portion
  source 1..22: mol_type = other RNA
ctggcaaggtttgcattatgcc

SEQ ID NO: 15618 - RNA, 22 nt, synthetic construct
  misc_feature 1..22: note = HBV-targeting guide sequence portion
  source 1..22: mol_type = other RNA
ctggccagacgccaacaaggta

SEQ ID NO: 15619 - RNA, 22 nt, synthetic construct
  misc_feature 1..22: note = HBV-targeting guide sequence portion
  source 1..22: mol_type = other RNA
ctggccagggatccttgttggg

SEQ ID NO: 15620 - RNA, 22 nt, synthetic construct
  misc_feature 1..22: note = HBV-targeting guide sequence portion
  source 1..22: mol_type = other RNA
ctggccgttgcctggcaacggg

SEQ ID NO: 15621 - RNA, 22 nt, synthetic construct
  misc_feature 1..22: note = HBV-targeting guide sequence portion
  source 1..22: mol_type = other RNA
ctggcgattggtagaggcagga

SEQ ID NO: 15622 - RNA, 22 nt, synthetic construct
  misc_feature 1..22: note = HBV-targeting guide sequence portion
  source 1..22: mol_type = other RNA
ctgggaggagttgggggaggag

SEQ ID NO: 15623 - RNA, 22 nt, synthetic construct
  misc_feature 1..22: note = HBV-targeting guide sequence portion
  source 1..22: mol_type = other RNA
ctgggatcttgcagagtttggt

SEQ ID NO: 15624 - RNA, 22 nt, synthetic construct
  misc_feature 1..22: note = HBV-targeting guide sequence portion
  source 1..22: mol_type = other RNA
ctgggattctttcccgaccacc

SEQ ID NO: 15625 - RNA, 22 nt, synthetic construct
  misc_feature 1..22: note = HBV-targeting guide sequence portion
  source 1..22: mol_type = other RNA
ctgggctttcggaaaattccta

SEQ ID NO: 15626 - RNA, 22 nt, synthetic construct
  misc_feature 1..22: note = HBV-targeting guide sequence portion
  source 1..22: mol_type = other RNA
ctggggagaactaatgactcta

SEQ ID NO: 15627 - RNA, 22 nt, synthetic construct
  misc_feature 1..22: note = HBV-targeting guide sequence portion
  source 1..22: mol_type = other RNA
ctgggtccaactggtggtcggg

SEQ ID NO: 15628 - RNA, 22 nt, synthetic construct
  misc_feature 1..22: note = HBV-targeting guide sequence portion
  source 1..22: mol_type = other RNA
ctgggtgggtactaatttagaa

SEQ ID NO: 15629 - RNA, 22 nt, synthetic construct
  misc_feature 1..22: note = HBV-targeting guide sequence portion
  source 1..22: mol_type = other RNA
ctgggttttgctgcccctttta

SEQ ID NO: 15630 - RNA, 22 nt, synthetic construct
  misc_feature 1..22: note = HBV-targeting guide sequence portion
  source 1..22: mol_type = other RNA
ctggtgcgcagaccaatttatg

SEQ ID NO: 15631 - RNA, 22 nt, synthetic construct
  misc_feature 1..22: note = HBV-targeting guide sequence portion
  source 1..22: mol_type = other RNA
ctggtggaaagattctgcccca

SEQ ID NO: 15632 - RNA, 22 nt, synthetic construct
  misc_feature 1..22: note = HBV-targeting guide sequence portion
  source 1..22: mol_type = other RNA
ctggtggctccagttcaggaac

SEQ ID NO: 15633 - RNA, 22 nt, synthetic construct
  misc_feature 1..22: note = HBV-targeting guide sequence portion
  source 1..22: mol_type = other RNA
ctggtggtcgggaaagaatccc

SEQ ID NO: 15634 - RNA, 22 nt, synthetic construct
  misc_feature 1..22: note = HBV-targeting guide sequence portion
  source 1..22: mol_type = other RNA
ctggtggttgatgatcctggaa

SEQ ID NO: 15635 - RNA, 22 nt, synthetic construct
  misc_feature 1..22: note = HBV-targeting guide sequence portion
  source 1..22: mol_type = other RNA
ctggttatcgctggatgtgtct

SEQ ID NO: 15636 - RNA, 22 nt, synthetic construct
  misc_feature 1..22: note = HBV-targeting guide sequence portion
  source 1..22: mol_type = other RNA
ctggttggggcttggtcatagg

SEQ ID NO: 15637 - RNA, 22 nt, synthetic construct
  misc_feature 1..22: note = HBV-targeting guide sequence portion
  source 1..22: mol_type = other RNA
ctgtaacacgagcaggggtcct

SEQ ID NO: 15638 - RNA, 22 nt, synthetic construct
  misc_feature 1..22: note = HBV-targeting guide sequence portion
  source 1..22: mol_type = other RNA
ctgtaagcgggcctacaaactg

SEQ ID NO: 15639 - RNA, 22 nt, synthetic construct
  misc_feature 1..22: note = HBV-targeting guide sequence portion
  source 1..22: mol_type = other RNA
ctgtacaaaaccttcggatgga

SEQ ID NO: 15640 - RNA, 22 nt, synthetic construct
  misc_feature 1..22: note = HBV-targeting guide sequence portion
  source 1..22: mol_type = other RNA
ctgtacagacttggcccccaat

SEQ ID NO: 15641 - RNA, 22 nt, synthetic construct
  misc_feature 1..22: note = HBV-targeting guide sequence portion
  source 1..22: mol_type = other RNA
ctgtacagcatcttgagtccct

SEQ ID NO: 15642 - RNA, 22 nt, synthetic construct
  misc_feature 1..22: note = HBV-targeting guide sequence portion
  source 1..22: mol_type = other RNA
ctgtacctgtctttaaccctca

SEQ ID NO: 15643 - RNA, 22 nt, synthetic construct
  misc_feature 1..22: note = HBV-targeting guide sequence portion
  source 1..22: mol_type = other RNA
ctgtagctcttgttcccaagaa

SEQ ID NO: 15644 - RNA, 22 nt, synthetic construct
  misc_feature 1..22: note = HBV-targeting guide sequence portion
  source 1..22: mol_type = other RNA
ctgtaggcataaattggtctgc

SEQ ID NO: 15645 - RNA, 22 nt, synthetic construct
  misc_feature 1..22: note = HBV-targeting guide sequence portion
  source 1..22: mol_type = other RNA
ctgtatcgggatgccttggagt

SEQ ID NO: 15646 - RNA, 22 nt, synthetic construct
  misc_feature 1..22: note = HBV-targeting guide sequence portion
  source 1..22: mol_type = other RNA
ctgtatctccctgctggtggct

SEQ ID NO: 15647 - RNA, 22 nt, synthetic construct
  misc_feature 1..22: note = HBV-targeting guide sequence portion
  source 1..22: mol_type = other RNA
ctgtattcccatcccatcatcc

SEQ ID NO: 15648 - RNA, 22 nt, synthetic construct
  misc_feature 1..22: note = HBV-targeting guide sequence portion
  source 1..22: mol_type = other RNA
ctgtcctccaacttgtcctggt

SEQ ID NO: 15649 - RNA, 22 nt, synthetic construct
  misc_feature 1..22: note = HBV-targeting guide sequence portion
  source 1..22: mol_type = other RNA
ctgtcctctaattccaggatca

SEQ ID NO: 15650 - RNA, 22 nt, synthetic construct
  misc_feature 1..22: note = HBV-targeting guide sequence portion
  source 1..22: mol_type = other RNA
ctgtcgtcctcttctctgcctg

SEQ ID NO: 15651 - RNA, 22 nt, synthetic construct
  misc_feature 1..22: note = HBV-targeting guide sequence portion
  source 1..22: mol_type = other RNA
ctgtctccacctctgagaaaca

SEQ ID NO: 15652 - RNA, 22 nt, synthetic construct
  misc_feature 1..22: note = HBV-targeting guide sequence portion
  source 1..22: mol_type = other RNA
ctgtctttaaccctcattggaa

SEQ ID NO: 15653 - RNA, 22 nt, synthetic construct
  misc_feature 1..22: note = HBV-targeting guide sequence portion
  source 1..22: mol_type = other RNA
ctgtgccaagtgtttgctgatg

SEQ ID NO: 15654 - RNA, 22 nt, synthetic construct
  misc_feature 1..22: note = HBV-targeting guide sequence portion
  source 1..22: mol_type = other RNA
ctgtgccttctcatctgccgga

SEQ ID NO: 15655 - RNA, 22 nt, synthetic construct
  misc_feature 1..22: note = HBV-targeting guide sequence portion
  source 1..22: mol_type = other RNA
ctgtgccttgggtggctttagg

SEQ ID NO: 15656 - RNA, 22 nt, synthetic construct
  misc_feature 1..22: note = HBV-targeting guide sequence portion
  source 1..22: mol_type = other RNA
ctgtgctgccaactggatcctg

SEQ ID NO: 15657 - RNA, 22 nt, synthetic construct
  misc_feature 1..22: note = HBV-targeting guide sequence portion
  source 1..22: mol_type = other RNA
ctgtggagttactctcgttttt

SEQ ID NO: 15658 - RNA, 22 nt, synthetic construct
  misc_feature 1..22: note = HBV-targeting guide sequence portion
  source 1..22: mol_type = other RNA
ctgtgggtcaccatattcttgg

SEQ ID NO: 15659 - RNA, 22 nt, synthetic construct
  misc_feature 1..22: note = HBV-targeting guide sequence portion
  source 1..22: mol_type = other RNA
ctgtgtaaacaatacctgaacc

SEQ ID NO: 15660 - RNA, 22 nt, synthetic construct
  misc_feature 1..22: note = HBV-targeting guide sequence portion
  source 1..22: mol_type = other RNA
ctgttaaccgggagttttctga

SEQ ID NO: 15661 - RNA, 22 nt, synthetic construct
  misc_feature 1..22: note = HBV-targeting guide sequence portion
  source 1..22: mol_type = other RNA
ctgttaccaattttcttttgtc

SEQ ID NO: 15662 - RNA, 22 nt, synthetic construct
  misc_feature 1..22: note = HBV-targeting guide sequence portion
  source 1..22: mol_type = other RNA
ctgttcaagcctccaagctgtg

SEQ ID NO: 15663 - RNA, 22 nt, synthetic construct
  misc_feature 1..22: note = HBV-targeting guide sequence portion
  source 1..22: mol_type = other RNA
ctgttcacattttttgataata

SEQ ID NO: 15664 - RNA, 22 nt, synthetic construct
  misc_feature 1..22: note = HBV-targeting guide sequence portion
  source 1..22: mol_type = other RNA
ctgttccgactactgcctctca

SEQ ID NO: 15665 - RNA, 22 nt, synthetic construct
  misc_feature 1..22: note = HBV-targeting guide sequence portion
  source 1..22: mol_type = other RNA
ctgttcctgaactggagccacc

SEQ ID NO: 15666 - RNA, 22 nt, synthetic construct
  misc_feature 1..22: note = HBV-targeting guide sequence portion
  source 1..22: mol_type = other RNA
ctgttgctgtacaaaaccttcg

SEQ ID NO: 15667 - RNA, 22 nt, synthetic construct
  misc_feature 1..22: note = HBV-targeting guide sequence portion
  source 1..22: mol_type = other RNA
ctgttgtcctctcccgcaaata

SEQ ID NO: 15668 - RNA, 22 nt, synthetic construct
  misc_feature 1..22: note = HBV-targeting guide sequence portion
  source 1..22: mol_type = other RNA
ctgtttggctttcagttatatg

SEQ ID NO: 15669 - RNA, 22 nt, synthetic construct
  misc_feature 1..22: note = HBV-targeting guide sequence portion
  source 1..22: mol_type = other RNA
ctgtttgtttaaagactgggag

SEQ ID NO: 15670 - RNA, 22 nt, synthetic construct
  misc_feature 1..22: note = HBV-targeting guide sequence portion
  source 1..22: mol_type = other RNA
cttaatttcatgggctatgtca

SEQ ID NO: 15671 - RNA, 22 nt, synthetic construct
  misc_feature 1..22: note = HBV-targeting guide sequence portion
  source 1..22: mol_type = other RNA
cttacaaggcctttctgtgtaa

SEQ ID NO: 15672 - RNA, 22 nt, synthetic construct
  misc_feature 1..22: note = HBV-targeting guide sequence portion
  source 1..22: mol_type = other RNA
cttacagttaatgagaaaagac

SEQ ID NO: 15673 - RNA, 22 nt, synthetic construct
  misc_feature 1..22: note = HBV-targeting guide sequence portion
  source 1..22: mol_type = other RNA
cttacataagaggactcttgga

SEQ ID NO: 15674 - RNA, 22 nt, synthetic construct
  misc_feature 1..22: note = HBV-targeting guide sequence portion
  source 1..22: mol_type = other RNA
cttacttttggaagagaaacgg

SEQ ID NO: 15675 - RNA, 22 nt, synthetic construct
  misc_feature 1..22: note = HBV-targeting guide sequence portion
  source 1..22: mol_type = other RNA
cttagattgaatacatgcatac

SEQ ID NO: 15676 - RNA, 22 nt, synthetic construct
  misc_feature 1..22: note = HBV-targeting guide sequence portion
  source 1..22: mol_type = other RNA
cttatagaccaccaaatgcccc

SEQ ID NO: 15677 - RNA, 22 nt, synthetic construct
  misc_feature 1..22: note = HBV-targeting guide sequence portion
  source 1..22: mol_type = other RNA
cttatataaaacacccgccttc

SEQ ID NO: 15678 - RNA, 22 nt, synthetic construct
  misc_feature 1..22: note = HBV-targeting guide sequence portion
  source 1..22: mol_type = other RNA
cttatccaagggcaagtatttg

SEQ ID NO: 15679 - RNA, 22 nt, synthetic construct
  misc_feature 1..22: note = HBV-targeting guide sequence portion
  source 1..22: mol_type = other RNA
cttatgagtccaagggatacta

SEQ ID NO: 15680 - RNA, 22 nt, synthetic construct
  misc_feature 1..22: note = HBV-targeting guide sequence portion
  source 1..22: mol_type = other RNA
cttatgtaagaccttgggcaag

SEQ ID NO: 15681 - RNA, 22 nt, synthetic construct
  misc_feature 1..22: note = HBV-targeting guide sequence portion
  source 1..22: mol_type = other RNA
cttattatccagaacatctagt

SEQ ID NO: 15682 - RNA, 22 nt, synthetic construct
  misc_feature 1..22: note = HBV-targeting guide sequence portion
  source 1..22: mol_type = other RNA
cttcaaagactgtttgtttaaa

SEQ ID NO: 15683 - RNA, 22 nt, synthetic construct
  misc_feature 1..22: note = HBV-targeting guide sequence portion
  source 1..22: mol_type = other RNA
cttcaatcccaacaaggatccc

SEQ ID NO: 15684 - RNA, 22 nt, synthetic construct
  misc_feature 1..22: note = HBV-targeting guide sequence portion
  source 1..22: mol_type = other RNA
cttcacctctgcacgtcgcatg

SEQ ID NO: 15685 - RNA, 22 nt, synthetic construct
  misc_feature 1..22: note = HBV-targeting guide sequence portion
  source 1..22: mol_type = other RNA
cttcagagcaaactccaacaat

SEQ ID NO: 15686 - RNA, 22 nt, synthetic construct
  misc_feature 1..22: note = HBV-targeting guide sequence portion
  source 1..22: mol_type = other RNA
cttcatcctgctgctatgcctc

SEQ ID NO: 15687 - RNA, 22 nt, synthetic construct
  misc_feature 1..22: note = HBV-targeting guide sequence portion
  source 1..22: mol_type = other RNA
cttccaaaagtaagacaagaaa

SEQ ID NO: 15688 - RNA, 22 nt, synthetic construct
  misc_feature 1..22: note = HBV-targeting guide sequence portion
  source 1..22: mol_type = other RNA
cttccaaactagacactattta

SEQ ID NO: 15689 - RNA, 22 nt, synthetic construct
  misc_feature 1..22: note = HBV-targeting guide sequence portion
  source 1..22: mol_type = other RNA
cttccaccaaactctgcaagat

SEQ ID NO: 15690 - RNA, 22 nt, synthetic construct
  misc_feature 1..22: note = HBV-targeting guide sequence portion
  source 1..22: mol_type = other RNA
cttccatagagtgtgtaaatag

SEQ ID NO: 15691 - RNA, 22 nt, synthetic construct
  misc_feature 1..22: note = HBV-targeting guide sequence portion
  source 1..22: mol_type = other RNA
cttccggagacttgtgttgtta

SEQ ID NO: 15692 - RNA, 22 nt, synthetic construct
  misc_feature 1..22: note = HBV-targeting guide sequence portion
  source 1..22: mol_type = other RNA
cttccgtacgagatcttctaga

SEQ ID NO: 15693 - RNA, 22 nt, synthetic construct
  misc_feature 1..22: note = HBV-targeting guide sequence portion
  source 1..22: mol_type = other RNA
cttcctcttcatcctgctgcta

SEQ ID NO: 15694 - RNA, 22 nt, synthetic construct
  misc_feature 1..22: note = HBV-targeting guide sequence portion
  source 1..22: mol_type = other RNA
cttcgcttcacctctgcacgtc

SEQ ID NO: 15695 - RNA, 22 nt, synthetic construct
  misc_feature 1..22: note = HBV-targeting guide sequence portion
  source 1..22: mol_type = other RNA
cttcggatggaaactgcacctg

SEQ ID NO: 15696 - RNA, 22 nt, synthetic construct
  misc_feature 1..22: note = HBV-targeting guide sequence portion
  source 1..22: mol_type = other RNA
cttcgtctgcgaggcgagggag

SEQ ID NO: 15697 - RNA, 22 nt, synthetic construct
  misc_feature 1..22: note = HBV-targeting guide sequence portion
  source 1..22: mol_type = other RNA
cttctaaattagtacccaccca

SEQ ID NO: 15698 - RNA, 22 nt, synthetic construct
  misc_feature 1..22: note = HBV-targeting guide sequence portion
  source 1..22: mol_type = other RNA
cttctactgtacctgtctttaa

SEQ ID NO: 15699 - RNA, 22 nt, synthetic construct
  misc_feature 1..22: note = HBV-targeting guide sequence portion
  source 1..22: mol_type = other RNA
cttctagataccgccgcagctc

SEQ ID NO: 15700 - RNA, 22 nt, synthetic construct
  misc_feature 1..22: note = HBV-targeting guide sequence portion
  source 1..22: mol_type = other RNA
cttctaggggacctgcctcgtc

SEQ ID NO: 15701 - RNA, 22 nt, synthetic construct
  misc_feature 1..22: note = HBV-targeting guide sequence portion
  source 1..22: mol_type = other RNA
cttctcatctgccggaccgtgt

SEQ ID NO: 15702 - RNA, 22 nt, synthetic construct
  misc_feature 1..22: note = HBV-targeting guide sequence portion
  source 1..22: mol_type = other RNA
cttctcgaggattggggaccct

SEQ ID NO: 15703 - RNA, 22 nt, synthetic construct
  misc_feature 1..22: note = HBV-targeting guide sequence portion
  source 1..22: mol_type = other RNA
cttctctcaattttctaggggg

SEQ ID NO: 15704 - RNA, 22 nt, synthetic construct
  misc_feature 1..22: note = HBV-targeting guide sequence portion
  source 1..22: mol_type = other RNA
cttctctgcctgccgttccgac

SEQ ID NO: 15705 - RNA, 22 nt, synthetic construct
  misc_feature 1..22: note = HBV-targeting guide sequence portion
  source 1..22: mol_type = other RNA
cttctgacttctttccttccgt

SEQ ID NO: 15706 - RNA, 22 nt, synthetic construct
  misc_feature 1..22: note = HBV-targeting guide sequence portion
  source 1..22: mol_type = other RNA
cttctgcgacgcggcgattgag

SEQ ID NO: 15707 - RNA, 22 nt, synthetic construct
  misc_feature 1..22: note = HBV-targeting guide sequence portion
  source 1..22: mol_type = other RNA
cttctggactatcaaggtatgt

SEQ ID NO: 15708 - RNA, 22 nt, synthetic construct
  misc_feature 1..22: note = HBV-targeting guide sequence portion
  source 1..22: mol_type = other RNA
cttctgggttttgctgcccctt

SEQ ID NO: 15709 - RNA, 22 nt, synthetic construct
  misc_feature 1..22: note = HBV-targeting guide sequence portion
  source 1..22: mol_type = other RNA
cttcttctaggggacctgcctc

SEQ ID NO: 15710 - RNA, 22 nt, synthetic construct
  misc_feature 1..22: note = HBV-targeting guide sequence portion
  source 1..22: mol_type = other RNA
cttcttgttggttcttctggac

SEQ ID NO: 15711 - RNA, 22 nt, synthetic construct
  misc_feature 1..22: note = HBV-targeting guide sequence portion
  source 1..22: mol_type = other RNA
cttctttccttccgtacgagat

SEQ ID NO: 15712 - RNA, 22 nt, synthetic construct
  misc_feature 1..22: note = HBV-targeting guide sequence portion
  source 1..22: mol_type = other RNA
cttgaacagtaggacatgaaca

SEQ ID NO: 15713 - RNA, 22 nt, synthetic construct
  misc_feature 1..22: note = HBV-targeting guide sequence portion
  source 1..22: mol_type = other RNA
cttgagcaggagtcgtgcaggt

SEQ ID NO: 15714 - RNA, 22 nt, synthetic construct
  misc_feature 1..22: note = HBV-targeting guide sequence portion
  source 1..22: mol_type = other RNA
cttgaggcatacttcaaagact

SEQ ID NO: 15715 - RNA, 22 nt, synthetic construct
  misc_feature 1..22: note = HBV-targeting guide sequence portion
  source 1..22: mol_type = other RNA
cttgagtccctttataccgctg

SEQ ID NO: 15716 - RNA, 22 nt, synthetic construct
  misc_feature 1..22: note = HBV-targeting guide sequence portion
  source 1..22: mol_type = other RNA
cttgatagtccagaagaaccaa

SEQ ID NO: 15717 - RNA, 22 nt, synthetic construct
  misc_feature 1..22: note = HBV-targeting guide sequence portion
  source 1..22: mol_type = other RNA
cttgatcttctaaattagtacc

SEQ ID NO: 15718 - RNA, 22 nt, synthetic construct
  misc_feature 1..22: note = HBV-targeting guide sequence portion
  source 1..22: mol_type = other RNA
cttgcagagtttggtggaaggt

SEQ ID NO: 15719 - RNA, 22 nt, synthetic construct
  misc_feature 1..22: note = HBV-targeting guide sequence portion
  source 1..22: mol_type = other RNA
cttgccagcaaatccgcctcct

SEQ ID NO: 15720 - RNA, 22 nt, synthetic construct
  misc_feature 1..22: note = HBV-targeting guide sequence portion
  source 1..22: mol_type = other RNA
cttgcccaaggtcttacataag

SEQ ID NO: 15721 - RNA, 22 nt, synthetic construct
  misc_feature 1..22: note = HBV-targeting guide sequence portion
  source 1..22: mol_type = other RNA
cttgcccttggataagggtatt

SEQ ID NO: 15722 - RNA, 22 nt, synthetic construct
  misc_feature 1..22: note = HBV-targeting guide sequence portion
  source 1..22: mol_type = other RNA
cttgcctgagtgcagtatggtg

SEQ ID NO: 15723 - RNA, 22 nt, synthetic construct
  misc_feature 1..22: note = HBV-targeting guide sequence portion
  source 1..22: mol_type = other RNA
cttggactcataaggtgggaaa

SEQ ID NO: 15724 - RNA, 22 nt, synthetic construct
  misc_feature 1..22: note = HBV-targeting guide sequence portion
  source 1..22: mol_type = other RNA
cttggactctctgcaatgtcaa

SEQ ID NO: 15725 - RNA, 22 nt, synthetic construct
  misc_feature 1..22: note = HBV-targeting guide sequence portion
  source 1..22: mol_type = other RNA
cttggaggcttgaacagtagga

SEQ ID NO: 15726 - RNA, 22 nt, synthetic construct
  misc_feature 1..22: note = HBV-targeting guide sequence portion
  source 1..22: mol_type = other RNA
cttggagtctcctgagcattgt

SEQ ID NO: 15727 - RNA, 22 nt, synthetic construct
  misc_feature 1..22: note = HBV-targeting guide sequence portion
  source 1..22: mol_type = other RNA
cttggataagggtattaaacct

SEQ ID NO: 15728 - RNA, 22 nt, synthetic construct
  misc_feature 1..22: note = HBV-targeting guide sequence portion
  source 1..22: mol_type = other RNA
cttggcacagacctggccgttg

SEQ ID NO: 15729 - RNA, 22 nt, synthetic construct
  misc_feature 1..22: note = HBV-targeting guide sequence portion
  source 1..22: mol_type = other RNA
cttggccaaaattcgcagtccc

SEQ ID NO: 15730 - RNA, 22 nt, synthetic construct
  misc_feature 1..22: note = HBV-targeting guide sequence portion
  source 1..22: mol_type = other RNA
cttggcccccaataccacatca

SEQ ID NO: 15731 - RNA, 22 nt, synthetic construct
  misc_feature 1..22: note = HBV-targeting guide sequence portion
  source 1..22: mol_type = other RNA
cttggctcagtttactagtgcc

SEQ ID NO: 15732 - RNA, 22 nt, synthetic construct
  misc_feature 1..22: note = HBV-targeting guide sequence portion
  source 1..22: mol_type = other RNA
cttgggaacaagagctacagca

SEQ ID NO: 15733 - RNA, 22 nt, synthetic construct
  misc_feature 1..22: note = HBV-targeting guide sequence portion
  source 1..22: mol_type = other RNA
cttgggcaagaattggtgggcg

SEQ ID NO: 15734 - RNA, 22 nt, synthetic construct
  misc_feature 1..22: note = HBV-targeting guide sequence portion
  source 1..22: mol_type = other RNA
cttggggccctgtcgtcctctt

SEQ ID NO: 15735 - RNA, 22 nt, synthetic construct
  misc_feature 1..22: note = HBV-targeting guide sequence portion
  source 1..22: mol_type = other RNA
cttgggtggctttagggcatgg

SEQ ID NO: 15736 - RNA, 22 nt, synthetic construct
  misc_feature 1..22: note = HBV-targeting guide sequence portion
  source 1..22: mol_type = other RNA
cttggtcataggccatcagcgc

SEQ ID NO: 15737 - RNA, 22 nt, synthetic construct
  misc_feature 1..22: note = HBV-targeting guide sequence portion
  source 1..22: mol_type = other RNA
cttggtgtagatgtatattagg

SEQ ID NO: 15738 - RNA, 22 nt, synthetic construct
  misc_feature 1..22: note = HBV-targeting guide sequence portion
  source 1..22: mol_type = other RNA
cttgtaagttggcgaaaaagtg

SEQ ID NO: 15739 - RNA, 22 nt, synthetic construct
  misc_feature 1..22: note = HBV-targeting guide sequence portion
  source 1..22: mol_type = other RNA
cttgtatgcatgtattcaatct

SEQ ID NO: 15740 - RNA, 22 nt, synthetic construct
  misc_feature 1..22: note = HBV-targeting guide sequence portion
  source 1..22: mol_type = other RNA
cttgtcaacaaggaaaaccccg

SEQ ID NO: 15741 - RNA, 22 nt, synthetic construct
  misc_feature 1..22: note = HBV-targeting guide sequence portion
  source 1..22: mol_type = other RNA
cttgtcctggttatcgctggat

SEQ ID NO: 15742 - RNA, 22 nt, synthetic construct
  misc_feature 1..22: note = HBV-targeting guide sequence portion
  source 1..22: mol_type = other RNA
cttgtcttacttttggaagaga

SEQ ID NO: 15743 - RNA, 22 nt, synthetic construct
  misc_feature 1..22: note = HBV-targeting guide sequence portion
  source 1..22: mol_type = other RNA
cttgtgttgttagacgacgagg

SEQ ID NO: 15744 - RNA, 22 nt, synthetic construct
  misc_feature 1..22: note = HBV-targeting guide sequence portion
  source 1..22: mol_type = other RNA
cttgttcatgtcctactgttca

SEQ ID NO: 15745 - RNA, 22 nt, synthetic construct
  misc_feature 1..22: note = HBV-targeting guide sequence portion
  source 1..22: mol_type = other RNA
cttgttcccaagaatatggtga

SEQ ID NO: 15746 - RNA, 22 nt, synthetic construct
  misc_feature 1..22: note = HBV-targeting guide sequence portion
  source 1..22: mol_type = other RNA
cttgttgacaagaatcctcaca

SEQ ID NO: 15747 - RNA, 22 nt, synthetic construct
  misc_feature 1..22: note = HBV-targeting guide sequence portion
  source 1..22: mol_type = other RNA
cttgttggcgtctggccaggga

SEQ ID NO: 15748 - RNA, 22 nt, synthetic construct
  misc_feature 1..22: note = HBV-targeting guide sequence portion
  source 1..22: mol_type = other RNA
cttgttgggattgaagtcccaa

SEQ ID NO: 15749 - RNA, 22 nt, synthetic construct
  misc_feature 1..22: note = HBV-targeting guide sequence portion
  source 1..22: mol_type = other RNA
cttgttggttcttctggactat

SEQ ID NO: 15750 - RNA, 22 nt, synthetic construct
  misc_feature 1..22: note = HBV-targeting guide sequence portion
  source 1..22: mol_type = other RNA
cttgttttgctcgcagccggtc

SEQ ID NO: 15751 - RNA, 22 nt, synthetic construct
  misc_feature 1..22: note = HBV-targeting guide sequence portion
  source 1..22: mol_type = other RNA
ctttaaacaaacagtctttgaa

SEQ ID NO: 15752 - RNA, 22 nt, synthetic construct
  misc_feature 1..22: note = HBV-targeting guide sequence portion
  source 1..22: mol_type = other RNA
ctttaaccctcattggaaaaca

SEQ ID NO: 15753 - RNA, 22 nt, synthetic construct
  misc_feature 1..22: note = HBV-targeting guide sequence portion
  source 1..22: mol_type = other RNA
ctttaatgcccttgtatgcatg

SEQ ID NO: 15754 - RNA, 22 nt, synthetic construct
  misc_feature 1..22: note = HBV-targeting guide sequence portion
  source 1..22: mol_type = other RNA
ctttaccccgttgccaggcaac

SEQ ID NO: 15755 - RNA, 22 nt, synthetic construct
  misc_feature 1..22: note = HBV-targeting guide sequence portion
  source 1..22: mol_type = other RNA
ctttacgcggactccccgtctg

SEQ ID NO: 15756 - RNA, 22 nt, synthetic construct
  misc_feature 1..22: note = HBV-targeting guide sequence portion
  source 1..22: mol_type = other RNA
ctttaggcccatatgagtgttg

SEQ ID NO: 15757 - RNA, 22 nt, synthetic construct
  misc_feature 1..22: note = HBV-targeting guide sequence portion
  source 1..22: mol_type = other RNA
ctttagggcatggacattgacc

SEQ ID NO: 15758 - RNA, 22 nt, synthetic construct
  misc_feature 1..22: note = HBV-targeting guide sequence portion
  source 1..22: mol_type = other RNA
ctttataccgctgttaccaatt

SEQ ID NO: 15759 - RNA, 22 nt, synthetic construct
  misc_feature 1..22: note = HBV-targeting guide sequence portion
  source 1..22: mol_type = other RNA
ctttatatgggtcaatgtccat

SEQ ID NO: 15760 - RNA, 22 nt, synthetic construct
  misc_feature 1..22: note = HBV-targeting guide sequence portion
  source 1..22: mol_type = other RNA
ctttattcttctactgtacctg

SEQ ID NO: 15761 - RNA, 22 nt, synthetic construct
  misc_feature 1..22: note = HBV-targeting guide sequence portion
  source 1..22: mol_type = other RNA
ctttcactttttcgccaactta

SEQ ID NO: 15762 - RNA, 22 nt, synthetic construct
  misc_feature 1..22: note = HBV-targeting guide sequence portion
  source 1..22: mol_type = other RNA
ctttcagttatatggatgatgt

SEQ ID NO: 15763 - RNA, 22 nt, synthetic construct
  misc_feature 1..22: note = HBV-targeting guide sequence portion
  source 1..22: mol_type = other RNA
ctttccaatcaataggcctgtt

SEQ ID NO: 15764 - RNA, 22 nt, synthetic construct
  misc_feature 1..22: note = HBV-targeting guide sequence portion
  source 1..22: mol_type = other RNA
ctttccaccagcaatcctctgg

SEQ ID NO: 15765 - RNA, 22 nt, synthetic construct
  misc_feature 1..22: note = HBV-targeting guide sequence portion
  source 1..22: mol_type = other RNA
ctttcccccactgtttggcttt

SEQ ID NO: 15766 - RNA, 22 nt, synthetic construct
  misc_feature 1..22: note = HBV-targeting guide sequence portion
  source 1..22: mol_type = other RNA
ctttcccgaccaccagttggac

SEQ ID NO: 15767 - RNA, 22 nt, synthetic construct
  misc_feature 1..22: note = HBV-targeting guide sequence portion
  source 1..22: mol_type = other RNA
ctttccggctcctctgccgatc

SEQ ID NO: 15768 - RNA, 22 nt, synthetic construct
  misc_feature 1..22: note = HBV-targeting guide sequence portion
  source 1..22: mol_type = other RNA
ctttccttccgtacgagatctt

SEQ ID NO: 15769 - RNA, 22 nt, synthetic construct
  misc_feature 1..22: note = HBV-targeting guide sequence portion
  source 1..22: mol_type = other RNA
ctttcggaaaattcctatggga

SEQ ID NO: 15770 - RNA, 22 nt, synthetic construct
  misc_feature 1..22: note = HBV-targeting guide sequence portion
  source 1..22: mol_type = other RNA
ctttctgtgtaaacaatacctg

SEQ ID NO: 15771 - RNA, 22 nt, synthetic construct
  misc_feature 1..22: note = HBV-targeting guide sequence portion
  source 1..22: mol_type = other RNA
ctttgaagtatgcctcaaggtc

SEQ ID NO: 15772 - RNA, 22 nt, synthetic construct
  misc_feature 1..22: note = HBV-targeting guide sequence portion
  source 1..22: mol_type = other RNA
ctttgattttgtgtatgatgtg

SEQ ID NO: 15773 - RNA, 22 nt, synthetic construct
  misc_feature 1..22: note = HBV-targeting guide sequence portion
  source 1..22: mol_type = other RNA
ctttgctggggagaactaatga

SEQ ID NO: 15774 - RNA, 22 nt, synthetic construct
  misc_feature 1..22: note = HBV-targeting guide sequence portion
  source 1..22: mol_type = other RNA
ctttgggtgtacatttaaaccc

SEQ ID NO: 15775 - RNA, 22 nt, synthetic construct
  misc_feature 1..22: note = HBV-targeting guide sequence portion
  source 1..22: mol_type = other RNA
ctttgtactaggaggctgtagg

SEQ ID NO: 15776 - RNA, 22 nt, synthetic construct
  misc_feature 1..22: note = HBV-targeting guide sequence portion
  source 1..22: mol_type = other RNA
ctttgtttacgtcccgtcggcg

SEQ ID NO: 15777 - RNA, 22 nt, synthetic construct
  misc_feature 1..22: note = HBV-targeting guide sequence portion
  source 1..22: mol_type = other RNA
ctttgttttgttagggtttaaa

SEQ ID NO: 15778 - RNA, 22 nt, synthetic construct
  misc_feature 1..22: note = HBV-targeting guide sequence portion
  source 1..22: mol_type = other RNA
cttttacacaatgtggttatcc

SEQ ID NO: 15779 - RNA, 22 nt, synthetic construct
  misc_feature 1..22: note = HBV-targeting guide sequence portion
  source 1..22: mol_type = other RNA
cttttcctaatatacatctaca

SEQ ID NO: 15780 - RNA, 22 nt, synthetic construct
  misc_feature 1..22: note = HBV-targeting guide sequence portion
  source 1..22: mol_type = other RNA
cttttctcattaactgtaagcg

SEQ ID NO: 15781 - RNA, 22 nt, synthetic construct
  misc_feature 1..22: note = HBV-targeting guide sequence portion
  source 1..22: mol_type = other RNA
cttttggaagagaaacggtcct

SEQ ID NO: 15782 - RNA, 22 nt, synthetic construct
  misc_feature 1..22: note = HBV-targeting guide sequence portion
  source 1..22: mol_type = other RNA
cttttggagtgtggattcgcac

SEQ ID NO: 15783 - RNA, 22 nt, synthetic construct
  misc_feature 1..22: note = HBV-targeting guide sequence portion
  source 1..22: mol_type = other RNA
cttttggggtggagccctcagg

SEQ ID NO: 15784 - RNA, 22 nt, synthetic construct
  misc_feature 1..22: note = HBV-targeting guide sequence portion
  source 1..22: mol_type = other RNA
cttttgtctttgggtgtacatt

SEQ ID NO: 15785 - RNA, 22 nt, synthetic construct
  misc_feature 1..22: note = HBV-targeting guide sequence portion
  source 1..22: mol_type = other RNA
ctttttcacctctgcctaatca

SEQ ID NO: 15786 - RNA, 22 nt, synthetic construct
  misc_feature 1..22: note = HBV-targeting guide sequence portion
  source 1..22: mol_type = other RNA
ctttttcgccaacttacaaggc

SEQ ID NO: 15787 - RNA, 22 nt, synthetic construct
  misc_feature 1..22: note = HBV-targeting guide sequence portion
  source 1..22: mol_type = other RNA
gaaaaagtgaaagcctgcttag

SEQ ID NO: 15788 - RNA, 22 nt, synthetic construct
  misc_feature 1..22: note = HBV-targeting guide sequence portion
  source 1..22: mol_type = other RNA
gaaaaagttgcatggtgctggt

SEQ ID NO: 15789 - RNA, 22 nt, synthetic construct
  misc_feature 1..22: note = HBV-targeting guide sequence portion
  source 1..22: mol_type = other RNA
gaaaacaccctcttttcctaat

SEQ ID NO: 15790 - RNA, 22 nt, synthetic construct
  misc_feature 1..22: note = HBV-targeting guide sequence portion
  source 1..22: mol_type = other RNA
gaaaaccccgcctgtaacacga

SEQ ID NO: 15791 - RNA, 22 nt, synthetic construct
  misc_feature 1..22: note = HBV-targeting guide sequence portion
  source 1..22: mol_type = other RNA
gaaaactcccggttaacaggcc

SEQ ID NO: 15792 - RNA, 22 nt, synthetic construct
  misc_feature 1..22: note = HBV-targeting guide sequence portion
  source 1..22: mol_type = other RNA
gaaaagacggttgaaattgatt

SEQ ID NO: 15793 - RNA, 22 nt, synthetic construct
  misc_feature 1..22: note = HBV-targeting guide sequence portion
  source 1..22: mol_type = other RNA
gaaaagagggtgttttccaatg

SEQ ID NO: 15794 - RNA, 22 nt, synthetic construct
  misc_feature 1..22: note = HBV-targeting guide sequence portion
  source 1..22: mol_type = other RNA
gaaaattcctatgggagtgggc

SEQ ID NO: 15795 - RNA, 22 nt, synthetic construct
  misc_feature 1..22: note = HBV-targeting guide sequence portion
  source 1..22: mol_type = other RNA
gaaaattgagagaagtccacca

SEQ ID NO: 15796 - RNA, 22 nt, synthetic construct
  misc_feature 1..22: note = HBV-targeting guide sequence portion
  source 1..22: mol_type = other RNA
gaaaattggtaacagcggtata

SEQ ID NO: 15797 - RNA, 22 nt, synthetic construct
  misc_feature 1..22: note = HBV-targeting guide sequence portion
  source 1..22: mol_type = other RNA
gaaacactcatcctcaggccat

SEQ ID NO: 15798 - RNA, 22 nt, synthetic construct
  misc_feature 1..22: note = HBV-targeting guide sequence portion
  source 1..22: mol_type = other RNA
gaaacataccttgatagtccag

SEQ ID NO: 15799 - RNA, 22 nt, synthetic construct
  misc_feature 1..22: note = HBV-targeting guide sequence portion
  source 1..22: mol_type = other RNA
gaaacattctttgattttgtgt

SEQ ID NO: 15800 - RNA, 22 nt, synthetic construct
  misc_feature 1..22: note = HBV-targeting guide sequence portion
  source 1..22: mol_type = other RNA
gaaaccacaatagttgtctgaa

SEQ ID NO: 15801 - RNA, 22 nt, synthetic construct
  misc_feature 1..22: note = HBV-targeting guide sequence portion
  source 1..22: mol_type = other RNA
gaaacgggctgaggcccactcc

SEQ ID NO: 15802 - RNA, 22 nt, synthetic construct
  misc_feature 1..22: note = HBV-targeting guide sequence portion
  source 1..22: mol_type = other RNA
gaaacggtcctagagtatttgg

SEQ ID NO: 15803 - RNA, 22 nt, synthetic construct
  misc_feature 1..22: note = HBV-targeting guide sequence portion
  source 1..22: mol_type = other RNA
gaaactgcacctgtattcccat

SEQ ID NO: 15804 - RNA, 22 nt, synthetic construct
  misc_feature 1..22: note = HBV-targeting guide sequence portion
  source 1..22: mol_type = other RNA
gaaagaagtcagaaggcaaaaa

SEQ ID NO: 15805 - RNA, 22 nt, synthetic construct
  misc_feature 1..22: note = HBV-targeting guide sequence portion
  source 1..22: mol_type = other RNA
gaaagaatcccagaggattgct

SEQ ID NO: 15806 - RNA, 22 nt, synthetic construct
  misc_feature 1..22: note = HBV-targeting guide sequence portion
  source 1..22: mol_type = other RNA
gaaagattctgccccatgctgt

SEQ ID NO: 15807 - RNA, 22 nt, synthetic construct
  misc_feature 1..22: note = HBV-targeting guide sequence portion
  source 1..22: mol_type = other RNA
gaaagccaaacagtgggggaaa

SEQ ID NO: 15808 - RNA, 22 nt, synthetic construct
  misc_feature 1..22: note = HBV-targeting guide sequence portion
  source 1..22: mol_type = other RNA
gaaagcccaggatgatgggatg

SEQ ID NO: 15809 - RNA, 22 nt, synthetic construct
  misc_feature 1..22: note = HBV-targeting guide sequence portion
  source 1..22: mol_type = other RNA
gaaagccctacgaaccactgaa

SEQ ID NO: 15810 - RNA, 22 nt, synthetic construct
  misc_feature 1..22: note = HBV-targeting guide sequence portion
  source 1..22: mol_type = other RNA
gaaagcctgcttagattgaata

SEQ ID NO: 15811 - RNA, 22 nt, synthetic construct
  misc_feature 1..22: note = HBV-targeting guide sequence portion
  source 1..22: mol_type = other RNA
gaaaggccttgtaagttggcga

SEQ ID NO: 15812 - RNA, 22 nt, synthetic construct
  misc_feature 1..22: note = HBV-targeting guide sequence portion
  source 1..22: mol_type = other RNA
gaaaggttccacgcatgcgctg

SEQ ID NO: 15813 - RNA, 22 nt, synthetic construct
  misc_feature 1..22: note = HBV-targeting guide sequence portion
  source 1..22: mol_type = other RNA
gaaagtgtgtcaacgaattgtg

SEQ ID NO: 15814 - RNA, 22 nt, synthetic construct
  misc_feature 1..22: note = HBV-targeting guide sequence portion
  source 1..22: mol_type = other RNA
gaaatgtgaaaccacaatagtt

SEQ ID NO: 15815 - RNA, 22 nt, synthetic construct
  misc_feature 1..22: note = HBV-targeting guide sequence portion
  source 1..22: mol_type = other RNA
gaaattaagagaataaccccat

SEQ ID NO: 15816 - RNA, 22 nt, synthetic construct
  misc_feature 1..22: note = HBV-targeting guide sequence portion
  source 1..22: mol_type = other RNA
gaaattgattatgcctgctagg

SEQ ID NO: 15817 - RNA, 22 nt, synthetic construct
  misc_feature 1..22: note = HBV-targeting guide sequence portion
  source 1..22: mol_type = other RNA
gaaattttacggggctttattc

SEQ ID NO: 15818 - RNA, 22 nt, synthetic construct
  misc_feature 1..22: note = HBV-targeting guide sequence portion
  source 1..22: mol_type = other RNA
gaacaaatggcactagtaaact

SEQ ID NO: 15819 - RNA, 22 nt, synthetic construct
  misc_feature 1..22: note = HBV-targeting guide sequence portion
  source 1..22: mol_type = other RNA
gaacaagagatgattaggcaga

SEQ ID NO: 15820 - RNA, 22 nt, synthetic construct
  misc_feature 1..22: note = HBV-targeting guide sequence portion
  source 1..22: mol_type = other RNA
gaacaagagctacagcatgggg

SEQ ID NO: 15821 - RNA, 22 nt, synthetic construct
  misc_feature 1..22: note = HBV-targeting guide sequence portion
  source 1..22: mol_type = other RNA
gaacaatgctcaggagactcca

SEQ ID NO: 15822 - RNA, 22 nt, synthetic construct
  misc_feature 1..22: note = HBV-targeting guide sequence portion
  source 1..22: mol_type = other RNA
gaacagggtttactgttcctga

SEQ ID NO: 15823 - RNA, 22 nt, synthetic construct
  misc_feature 1..22: note = HBV-targeting guide sequence portion
  source 1..22: mol_type = other RNA
gaacagtaaaccctgttccgac

SEQ ID NO: 15824 - RNA, 22 nt, synthetic construct
  misc_feature 1..22: note = HBV-targeting guide sequence portion
  source 1..22: mol_type = other RNA
gaacagtaggacatgaacaaga

SEQ ID NO: 15825 - RNA, 22 nt, synthetic construct
  misc_feature 1..22: note = HBV-targeting guide sequence portion
  source 1..22: mol_type = other RNA
gaacagtttgtaggcccgctta

SEQ ID NO: 15826 - RNA, 22 nt, synthetic construct
  misc_feature 1..22: note = HBV-targeting guide sequence portion
  source 1..22: mol_type = other RNA
gaacatcacatcaggattccta

SEQ ID NO: 15827 - RNA, 22 nt, synthetic construct
  misc_feature 1..22: note = HBV-targeting guide sequence portion
  source 1..22: mol_type = other RNA
gaacatctagttaatcattact

SEQ ID NO: 15828 - RNA, 22 nt, synthetic construct
  misc_feature 1..22: note = HBV-targeting guide sequence portion
  source 1..22: mol_type = other RNA
gaacatggagaacatcacatca

SEQ ID NO: 15829 - RNA, 22 nt, synthetic construct
  misc_feature 1..22: note = HBV-targeting guide sequence portion
  source 1..22: mol_type = other RNA
gaaccaacaagaagatgaggca

SEQ ID NO: 15830 - RNA, 22 nt, synthetic construct
  misc_feature 1..22: note = HBV-targeting guide sequence portion
  source 1..22: mol_type = other RNA
gaaccactgaacaaatggcact

SEQ ID NO: 15831 - RNA, 22 nt, synthetic construct
  misc_feature 1..22: note = HBV-targeting guide sequence portion
  source 1..22: mol_type = other RNA
gaaccctagcccgaatgctcca

SEQ ID NO: 15832 - RNA, 22 nt, synthetic construct
  misc_feature 1..22: note = HBV-targeting guide sequence portion
  source 1..22: mol_type = other RNA
gaacctctatgtatccctcctg

SEQ ID NO: 15833 - RNA, 22 nt, synthetic construct
  misc_feature 1..22: note = HBV-targeting guide sequence portion
  source 1..22: mol_type = other RNA
gaacctgcacgactcctgctca

SEQ ID NO: 15834 - RNA, 22 nt, synthetic construct
  misc_feature 1..22: note = HBV-targeting guide sequence portion
  source 1..22: mol_type = other RNA
gaacctttaccccgttgccagg

SEQ ID NO: 15835 - RNA, 22 nt, synthetic construct
  misc_feature 1..22: note = HBV-targeting guide sequence portion
  source 1..22: mol_type = other RNA
gaacctttccggctcctctgcc

SEQ ID NO: 15836 - RNA, 22 nt, synthetic construct
  misc_feature 1..22: note = HBV-targeting guide sequence portion
  source 1..22: mol_type = other RNA
gaacgatgtatatttgcgggag

SEQ ID NO: 15837 - RNA, 22 nt, synthetic construct
  misc_feature 1..22: note = HBV-targeting guide sequence portion
  source 1..22: mol_type = other RNA
gaacgcccaccaattcttgccc

SEQ ID NO: 15838 - RNA, 22 nt, synthetic construct
  misc_feature 1..22: note = HBV-targeting guide sequence portion
  source 1..22: mol_type = other RNA
gaacggcaggcagagaagagga

SEQ ID NO: 15839 - RNA, 22 nt, synthetic construct
  misc_feature 1..22: note = HBV-targeting guide sequence portion
  source 1..22: mol_type = other RNA
gaactaatgactctagctacct

SEQ ID NO: 15840 - RNA, 22 nt, synthetic construct
  misc_feature 1..22: note = HBV-targeting guide sequence portion
  source 1..22: mol_type = other RNA
gaactaccgtgtgtcttggcca

SEQ ID NO: 15841 - RNA, 22 nt, synthetic construct
  misc_feature 1..22: note = HBV-targeting guide sequence portion
  source 1..22: mol_type = other RNA
gaactccctcgcctcgcagacg

SEQ ID NO: 15842 - RNA, 22 nt, synthetic construct
  misc_feature 1..22: note = HBV-targeting guide sequence portion
  source 1..22: mol_type = other RNA
gaactcctagccgcttgttttg

SEQ ID NO: 15843 - RNA, 22 nt, synthetic construct
  misc_feature 1..22: note = HBV-targeting guide sequence portion
  source 1..22: mol_type = other RNA
gaactggagccaccagcaggga

SEQ ID NO: 15844 - RNA, 22 nt, synthetic construct
  misc_feature 1..22: note = HBV-targeting guide sequence portion
  source 1..22: mol_type = other RNA
gaactttaggcccatatgagtg

SEQ ID NO: 15845 - RNA, 22 nt, synthetic construct
  misc_feature 1..22: note = HBV-targeting guide sequence portion
  source 1..22: mol_type = other RNA
gaagaaccaacaagaagatgag

SEQ ID NO: 15846 - RNA, 22 nt, synthetic construct
  misc_feature 1..22: note = HBV-targeting guide sequence portion
  source 1..22: mol_type = other RNA
gaagaactccctcgcctcgcag

SEQ ID NO: 15847 - RNA, 22 nt, synthetic construct
  misc_feature 1..22: note = HBV-targeting guide sequence portion
  source 1..22: mol_type = other RNA
gaagaagaactccctcgcctcg

SEQ ID NO: 15848 - RNA, 22 nt, synthetic construct
  misc_feature 1..22: note = HBV-targeting guide sequence portion
  source 1..22: mol_type = other RNA
gaagaataaagccccgtaaaat

SEQ ID NO: 15849 - RNA, 22 nt, synthetic construct
  misc_feature 1..22: note = HBV-targeting guide sequence portion
  source 1..22: mol_type = other RNA
gaagacccacaattcgttgaca

SEQ ID NO: 15850 - RNA, 22 nt, synthetic construct
  misc_feature 1..22: note = HBV-targeting guide sequence portion
  source 1..22: mol_type = other RNA
gaagagaaacggtcctagagta

SEQ ID NO: 15851 - RNA, 22 nt, synthetic construct
  misc_feature 1..22: note = HBV-targeting guide sequence portion
  source 1..22: mol_type = other RNA
gaagaggaagatgataaaacgc

SEQ ID NO: 15852 - RNA, 22 nt, synthetic construct
  misc_feature 1..22: note = HBV-targeting guide sequence portion
  source 1..22: mol_type = other RNA
gaagaggacgacagggccccaa

SEQ ID NO: 15853 - RNA, 22 nt, synthetic construct
  misc_feature 1..22: note = HBV-targeting guide sequence portion
  source 1..22: mol_type = other RNA
gaagatcaagcatctagggacc

SEQ ID NO: 15854 - RNA, 22 nt, synthetic construct
  misc_feature 1..22: note = HBV-targeting guide sequence portion
  source 1..22: mol_type = other RNA
gaagatctcaatcgccgcgtcg

SEQ ID NO: 15855 - RNA, 22 nt, synthetic construct
  misc_feature 1..22: note = HBV-targeting guide sequence portion
  source 1..22: mol_type = other RNA
gaagatctcaatctcggggatc

SEQ ID NO: 15856 - RNA, 22 nt, synthetic construct
  misc_feature 1..22: note = HBV-targeting guide sequence portion
  source 1..22: mol_type = other RNA
gaagatctcgtacggaaggaaa

SEQ ID NO: 15857 - RNA, 22 nt, synthetic construct
  misc_feature 1..22: note = HBV-targeting guide sequence portion
  source 1..22: mol_type = other RNA
gaagatgaggcatagcagcagg

SEQ ID NO: 15858 - RNA, 22 nt, synthetic construct
  misc_feature 1..22: note = HBV-targeting guide sequence portion
  source 1..22: mol_type = other RNA
gaagatgataaaacgccgcaga

SEQ ID NO: 15859 - RNA, 22 nt, synthetic construct
  misc_feature 1..22: note = HBV-targeting guide sequence portion
  source 1..22: mol_type = other RNA
gaagattgacgatatgtgagag

SEQ ID NO: 15860 - RNA, 22 nt, synthetic construct
  misc_feature 1..22: note = HBV-targeting guide sequence portion
  source 1..22: mol_type = other RNA
gaagcgaagtgcacacggtccg

SEQ ID NO: 15861 - RNA, 22 nt, synthetic construct
  misc_feature 1..22: note = HBV-targeting guide sequence portion
  source 1..22: mol_type = other RNA
gaaggaaagaagtcagaaggca

SEQ ID NO: 15862 - RNA, 22 nt, synthetic construct
  misc_feature 1..22: note = HBV-targeting guide sequence portion
  source 1..22: mol_type = other RNA
gaaggcaaaaacgagagtaact

SEQ ID NO: 15863 - RNA, 22 nt, synthetic construct
  misc_feature 1..22: note = HBV-targeting guide sequence portion
  source 1..22: mol_type = other RNA
gaaggcacagacggggagtccg

SEQ ID NO: 15864 - RNA, 22 nt, synthetic construct
  misc_feature 1..22: note = HBV-targeting guide sequence portion
  source 1..22: mol_type = other RNA
gaaggcgggtgttttatataag

SEQ ID NO: 15865 - RNA, 22 nt, synthetic construct
  misc_feature 1..22: note = HBV-targeting guide sequence portion
  source 1..22: mol_type = other RNA
gaaggctgggtccaactggtgg

SEQ ID NO: 15866 - RNA, 22 nt, synthetic construct
  misc_feature 1..22: note = HBV-targeting guide sequence portion
  source 1..22: mol_type = other RNA
gaaggttttgtacagcaacagg

SEQ ID NO: 15867 - RNA, 22 nt, synthetic construct
  misc_feature 1..22: note = HBV-targeting guide sequence portion
  source 1..22: mol_type = other RNA
gaagtaatgattaactagatgt

SEQ ID NO: 15868 - RNA, 22 nt, synthetic construct
  misc_feature 1..22: note = HBV-targeting guide sequence portion
  source 1..22: mol_type = other RNA
gaagtatgcctcaaggtcggtc

SEQ ID NO: 15869 - RNA, 22 nt, synthetic construct
  misc_feature 1..22: note = HBV-targeting guide sequence portion
  source 1..22: mol_type = other RNA
gaagtcagaaggcaaaaacgag

SEQ ID NO: 15870 - RNA, 22 nt, synthetic construct
  misc_feature 1..22: note = HBV-targeting guide sequence portion
  source 1..22: mol_type = other RNA
gaagtccaccacgagtctagac

SEQ ID NO: 15871 - RNA, 22 nt, synthetic construct
  misc_feature 1..22: note = HBV-targeting guide sequence portion
  source 1..22: mol_type = other RNA
gaagtcccaatctggattgttg

SEQ ID NO: 15872 - RNA, 22 nt, synthetic construct
  misc_feature 1..22: note = HBV-targeting guide sequence portion
  source 1..22: mol_type = other RNA
gaagtgcacacggtccggcaga

SEQ ID NO: 15873 - RNA, 22 nt, synthetic construct
  misc_feature 1..22: note = HBV-targeting guide sequence portion
  source 1..22: mol_type = other RNA
gaagtgttgataggataggggc

SEQ ID NO: 15874 - RNA, 22 nt, synthetic construct
  misc_feature 1..22: note = HBV-targeting guide sequence portion
  source 1..22: mol_type = other RNA
gaataaagccccgtaaaatttc

SEQ ID NO: 15875 - RNA, 22 nt, synthetic construct
  misc_feature 1..22: note = HBV-targeting guide sequence portion
  source 1..22: mol_type = other RNA
gaataaccccatctctttgttt

SEQ ID NO: 15876 - RNA, 22 nt, synthetic construct
  misc_feature 1..22: note = HBV-targeting guide sequence portion
  source 1..22: mol_type = other RNA
gaatacaggtgcagtttccatc

SEQ ID NO: 15877 - RNA, 22 nt, synthetic construct
  misc_feature 1..22: note = HBV-targeting guide sequence portion
  source 1..22: mol_type = other RNA
gaatacatgcatacaagggcat

SEQ ID NO: 15878 - RNA, 22 nt, synthetic construct
  misc_feature 1..22: note = HBV-targeting guide sequence portion
  source 1..22: mol_type = other RNA
gaatatggtgacccacagaatg

SEQ ID NO: 15879 - RNA, 22 nt, synthetic construct
  misc_feature 1..22: note = HBV-targeting guide sequence portion
  source 1..22: mol_type = other RNA
gaatccacactccaaaagacac

SEQ ID NO: 15880 - RNA, 22 nt, synthetic construct
  misc_feature 1..22: note = HBV-targeting guide sequence portion
  source 1..22: mol_type = other RNA
gaatcccagaggattgctggtg

SEQ ID NO: 15881 - RNA, 22 nt, synthetic construct
  misc_feature 1..22: note = HBV-targeting guide sequence portion
  source 1..22: mol_type = other RNA
gaatcccgcggacgacccatct

SEQ ID NO: 15882 - RNA, 22 nt, synthetic construct
  misc_feature 1..22: note = HBV-targeting guide sequence portion
  source 1..22: mol_type = other RNA
gaatcctcacaataccgcagag

SEQ ID NO: 15883 - RNA, 22 nt, synthetic construct
  misc_feature 1..22: note = HBV-targeting guide sequence portion
  source 1..22: mol_type = other RNA
gaatcctgatgtgatgttctcc

SEQ ID NO: 15884 - RNA, 22 nt, synthetic construct
  misc_feature 1..22: note = HBV-targeting guide sequence portion
  source 1..22: mol_type = other RNA
gaatctttccaccagcaatcct

SEQ ID NO: 15885 - RNA, 22 nt, synthetic construct
  misc_feature 1..22: note = HBV-targeting guide sequence portion
  source 1..22: mol_type = other RNA
gaatgaggcgctatgtgttgac

SEQ ID NO: 15886 - RNA, 22 nt, synthetic construct
  misc_feature 1..22: note = HBV-targeting guide sequence portion
  source 1..22: mol_type = other RNA
gaatgctccagctcctaccttg

SEQ ID NO: 15887 - RNA, 22 nt, synthetic construct
  misc_feature 1..22: note = HBV-targeting guide sequence portion
  source 1..22: mol_type = other RNA
gaatgtttcagaaaactcccgg

SEQ ID NO: 15888 - RNA, 22 nt, synthetic construct
  misc_feature 1..22: note = HBV-targeting guide sequence portion
  source 1..22: mol_type = other RNA
gaatgtttgctccagaccggct

SEQ ID NO: 15889 - RNA, 22 nt, synthetic construct
  misc_feature 1..22: note = HBV-targeting guide sequence portion
  source 1..22: mol_type = other RNA
gaattagaggacagacgggaaa

SEQ ID NO: 15890 - RNA, 22 nt, synthetic construct
  misc_feature 1..22: note = HBV-targeting guide sequence portion
  source 1..22: mol_type = other RNA
gaattgcttgcctgagtgcagt

SEQ ID NO: 15891 - RNA, 22 nt, synthetic construct
  misc_feature 1..22: note = HBV-targeting guide sequence portion
  source 1..22: mol_type = other RNA
gaattggtgggcgttcacggtg

SEQ ID NO: 15892 - RNA, 22 nt, synthetic construct
  misc_feature 1..22: note = HBV-targeting guide sequence portion
  source 1..22: mol_type = other RNA
gaattgtgggtcttctgggttt

SEQ ID NO: 15893 - RNA, 22 nt, synthetic construct
  misc_feature 1..22: note = HBV-targeting guide sequence portion
  source 1..22: mol_type = other RNA
gaatttaggataaaacctagca

SEQ ID NO: 15894 - RNA, 22 nt, synthetic construct
  misc_feature 1..22: note = HBV-targeting guide sequence portion
  source 1..22: mol_type = other RNA
gaatttggagctactgtggagt

SEQ ID NO: 15895 - RNA, 22 nt, synthetic construct
  misc_feature 1..22: note = HBV-targeting guide sequence portion
  source 1..22: mol_type = other RNA
gaattttccgaaagcccaggat

SEQ ID NO: 15896 - RNA, 22 nt, synthetic construct
  misc_feature 1..22: note = HBV-targeting guide sequence portion
  source 1..22: mol_type = other RNA
gaattttggccaagacacacgg

SEQ ID NO: 15897 - RNA, 22 nt, synthetic construct
  misc_feature 1..22: note = HBV-targeting guide sequence portion
  source 1..22: mol_type = other RNA
gacaaaagaaaattggtaacag

SEQ ID NO: 15898 - RNA, 22 nt, synthetic construct
  misc_feature 1..22: note = HBV-targeting guide sequence portion
  source 1..22: mol_type = other RNA
gacaacagagttgtcagtcccg

SEQ ID NO: 15899 - RNA, 22 nt, synthetic construct
  misc_feature 1..22: note = HBV-targeting guide sequence portion
  source 1..22: mol_type = other RNA
gacaactattgtggtttcacat

SEQ ID NO: 15900 - RNA, 22 nt, synthetic construct
  misc_feature 1..22: note = HBV-targeting guide sequence portion
  source 1..22: mol_type = other RNA
gacaactctgttgtcctctccc

SEQ ID NO: 15901 - RNA, 22 nt, synthetic construct
  misc_feature 1..22: note = HBV-targeting guide sequence portion
  source 1..22: mol_type = other RNA
gacaagaaatgtgaaaccacaa

SEQ ID NO: 15902 - RNA, 22 nt, synthetic construct
  misc_feature 1..22: note = HBV-targeting guide sequence portion
  source 1..22: mol_type = other RNA
gacaagaatcctcacaataccg

SEQ ID NO: 15903 - RNA, 22 nt, synthetic construct
  misc_feature 1..22: note = HBV-targeting guide sequence portion
  source 1..22: mol_type = other RNA
gacaagttggaggacaggaggt

SEQ ID NO: 15904 - RNA, 22 nt, synthetic construct
  misc_feature 1..22: note = HBV-targeting guide sequence portion
  source 1..22: mol_type = other RNA
gacacacggtagttccccctag

SEQ ID NO: 15905 - RNA, 22 nt, synthetic construct
  misc_feature 1..22: note = HBV-targeting guide sequence portion
  source 1..22: mol_type = other RNA
gacacactttccaatcaatagg

SEQ ID NO: 15906 - RNA, 22 nt, synthetic construct
  misc_feature 1..22: note = HBV-targeting guide sequence portion
  source 1..22: mol_type = other RNA
gacacatccagcgataaccagg

SEQ ID NO: 15907 - RNA, 22 nt, synthetic construct
  misc_feature 1..22: note = HBV-targeting guide sequence portion
  source 1..22: mol_type = other RNA
gacaccaaatactctaggaccg

SEQ ID NO: 15908 - RNA, 22 nt, synthetic construct
  misc_feature 1..22: note = HBV-targeting guide sequence portion
  source 1..22: mol_type = other RNA
gacactatttacacactctatg

SEQ ID NO: 15909 - RNA, 22 nt, synthetic construct
  misc_feature 1..22: note = HBV-targeting guide sequence portion
  source 1..22: mol_type = other RNA
gacactctcttatataaaacac

SEQ ID NO: 15910 - RNA, 22 nt, synthetic construct
  misc_feature 1..22: note = HBV-targeting guide sequence portion
  source 1..22: mol_type = other RNA
gacagacgggaaacataccttg

SEQ ID NO: 15911 - RNA, 22 nt, synthetic construct
  misc_feature 1..22: note = HBV-targeting guide sequence portion
  source 1..22: mol_type = other RNA
gacagcggggtaggctgccgtc

SEQ ID NO: 15912 - RNA, 22 nt, synthetic construct
  misc_feature 1..22: note = HBV-targeting guide sequence portion
  source 1..22: mol_type = other RNA
gacaggaggttggtgagtgatt

SEQ ID NO: 15913 - RNA, 22 nt, synthetic construct
  misc_feature 1..22: note = HBV-targeting guide sequence portion
  source 1..22: mol_type = other RNA
gacagggccccaagcggcctcg

SEQ ID NO: 15914 - RNA, 22 nt, synthetic construct
  misc_feature 1..22: note = HBV-targeting guide sequence portion
  source 1..22: mol_type = other RNA
gacaggtacagtagaagaataa

SEQ ID NO: 15915 - RNA, 22 nt, synthetic construct
  misc_feature 1..22: note = HBV-targeting guide sequence portion
  source 1..22: mol_type = other RNA
gacataactgactactaggtcc

SEQ ID NO: 15916 - RNA, 22 nt, synthetic construct
  misc_feature 1..22: note = HBV-targeting guide sequence portion
  source 1..22: mol_type = other RNA
gacatagcccatgaaattaaga

SEQ ID NO: 15917 - RNA, 22 nt, synthetic construct
  misc_feature 1..22: note = HBV-targeting guide sequence portion
  source 1..22: mol_type = other RNA
gacatgaacaagagatgattag

SEQ ID NO: 15918 - RNA, 22 nt, synthetic construct
  misc_feature 1..22: note = HBV-targeting guide sequence portion
  source 1..22: mol_type = other RNA
gacattgacccatataaagaat

SEQ ID NO: 15919 - RNA, 22 nt, synthetic construct
  misc_feature 1..22: note = HBV-targeting guide sequence portion
  source 1..22: mol_type = other RNA
gacattgcagagagtccaagag

SEQ ID NO: 15920 - RNA, 22 nt, synthetic construct
  misc_feature 1..22: note = HBV-targeting guide sequence portion
  source 1..22: mol_type = other RNA
gaccaagccccaaccagtgggg

SEQ ID NO: 15921 - RNA, 22 nt, synthetic construct
  misc_feature 1..22: note = HBV-targeting guide sequence portion
  source 1..22: mol_type = other RNA
gaccaatttatgcctacagcct

SEQ ID NO: 15922 - RNA, 22 nt, synthetic construct
  misc_feature 1..22: note = HBV-targeting guide sequence portion
  source 1..22: mol_type = other RNA
gaccaccaaatgcccctatcct

SEQ ID NO: 15923 - RNA, 22 nt, synthetic construct
  misc_feature 1..22: note = HBV-targeting guide sequence portion
  source 1..22: mol_type = other RNA
gaccaccagttggacccagcct

SEQ ID NO: 15924 - RNA, 22 nt, synthetic construct
  misc_feature 1..22: note = HBV-targeting guide sequence portion
  source 1..22: mol_type = other RNA
gaccaccgtgaacgcccaccaa

SEQ ID NO: 15925 - RNA, 22 nt, synthetic construct
  misc_feature 1..22: note = HBV-targeting guide sequence portion
  source 1..22: mol_type = other RNA
gaccacggggcgcacctctctt

SEQ ID NO: 15926 - RNA, 22 nt, synthetic construct
  misc_feature 1..22: note = HBV-targeting guide sequence portion
  source 1..22: mol_type = other RNA
gacccacaattcgttgacacac

SEQ ID NO: 15927 - RNA, 22 nt, synthetic construct
  misc_feature 1..22: note = HBV-targeting guide sequence portion
  source 1..22: mol_type = other RNA
gacccacagaatgaggcgctat

SEQ ID NO: 15928 - RNA, 22 nt, synthetic construct
  misc_feature 1..22: note = HBV-targeting guide sequence portion
  source 1..22: mol_type = other RNA
gacccagccttcagagcaaact

SEQ ID NO: 15929 - RNA, 22 nt, synthetic construct
  misc_feature 1..22: note = HBV-targeting guide sequence portion
  source 1..22: mol_type = other RNA
gacccatataaagaatttggag

SEQ ID NO: 15930 - RNA, 22 nt, synthetic construct
  misc_feature 1..22: note = HBV-targeting guide sequence portion
  source 1..22: mol_type = other RNA
gacccatctcgaggccgcttgg

SEQ ID NO: 15931 - RNA, 22 nt, synthetic construct
  misc_feature 1..22: note = HBV-targeting guide sequence portion
  source 1..22: mol_type = other RNA
gacccctgctcgtgttacaggc

SEQ ID NO: 15932 - RNA, 22 nt, synthetic construct
  misc_feature 1..22: note = HBV-targeting guide sequence portion
  source 1..22: mol_type = other RNA
gaccctgcagaacctgcacgac

SEQ ID NO: 15933 - RNA, 22 nt, synthetic construct
  misc_feature 1..22: note = HBV-targeting guide sequence portion
  source 1..22: mol_type = other RNA
gaccctgcgctgaacatggaga

SEQ ID NO: 15934 - RNA, 22 nt, synthetic construct
  misc_feature 1..22: note = HBV-targeting guide sequence portion
  source 1..22: mol_type = other RNA
gaccgaccacggggcgcacctc

SEQ ID NO: 15935 - RNA, 22 nt, synthetic construct
  misc_feature 1..22: note = HBV-targeting guide sequence portion
  source 1..22: mol_type = other RNA
gaccgaccttgaggcatacttc

SEQ ID NO: 15936 - RNA, 22 nt, synthetic construct
  misc_feature 1..22: note = HBV-targeting guide sequence portion
  source 1..22: mol_type = other RNA
gaccggctgcgagcaaaacaag

SEQ ID NO: 15937 - RNA, 22 nt, synthetic construct
  misc_feature 1..22: note = HBV-targeting guide sequence portion
  source 1..22: mol_type = other RNA
gaccgtgtgcacttcgcttcac

SEQ ID NO: 15938 - RNA, 22 nt, synthetic construct
  misc_feature 1..22: note = HBV-targeting guide sequence portion
  source 1..22: mol_type = other RNA
gaccgtttctcttccaaaagta

SEQ ID NO: 15939 - RNA, 22 nt, synthetic construct
  misc_feature 1..22: note = HBV-targeting guide sequence portion
  source 1..22: mol_type = other RNA
gacctagtagtcagttatgtca

SEQ ID NO: 15940 - RNA, 22 nt, synthetic construct
  misc_feature 1..22: note = HBV-targeting guide sequence portion
  source 1..22: mol_type = other RNA
gacctgcctcgtcgtctaacaa

SEQ ID NO: 15941 - RNA, 22 nt, synthetic construct
  misc_feature 1..22: note = HBV-targeting guide sequence portion
  source 1..22: mol_type = other RNA
gacctggccgttgcctggcaac

SEQ ID NO: 15942 - RNA, 22 nt, synthetic construct
  misc_feature 1..22: note = HBV-targeting guide sequence portion
  source 1..22: mol_type = other RNA
gaccttgaggcatacttcaaag

SEQ ID NO: 15943 - RNA, 22 nt, synthetic construct
  misc_feature 1..22: note = HBV-targeting guide sequence portion
  source 1..22: mol_type = other RNA
gaccttgggcaagaattggtgg

SEQ ID NO: 15944 - RNA, 22 nt, synthetic construct
  misc_feature 1..22: note = HBV-targeting guide sequence portion
  source 1..22: mol_type = other RNA
gacgaagatctcaatcgccgcg

SEQ ID NO: 15945 - RNA, 22 nt, synthetic construct
  misc_feature 1..22: note = HBV-targeting guide sequence portion
  source 1..22: mol_type = other RNA
gacgacagggccccaagcggcc

SEQ ID NO: 15946 - RNA, 22 nt, synthetic construct
  misc_feature 1..22: note = HBV-targeting guide sequence portion
  source 1..22: mol_type = other RNA
gacgacccatctcgaggccgct

SEQ ID NO: 15947 - RNA, 22 nt, synthetic construct
  misc_feature 1..22: note = HBV-targeting guide sequence portion
  source 1..22: mol_type = other RNA
gacgacgaggcaggtcccctag

SEQ ID NO: 15948 - RNA, 22 nt, synthetic construct
  misc_feature 1..22: note = HBV-targeting guide sequence portion
  source 1..22: mol_type = other RNA
gacgaggcaggtcccctagaag

SEQ ID NO: 15949 - RNA, 22 nt, synthetic construct
  misc_feature 1..22: note = HBV-targeting guide sequence portion
  source 1..22: mol_type = other RNA
gacgatatgtgagaggcagtag

SEQ ID NO: 15950 - RNA, 22 nt, synthetic construct
  misc_feature 1..22: note = HBV-targeting guide sequence portion
  source 1..22: mol_type = other RNA
gacgccaacaaggtaggagctg

SEQ ID NO: 15951 - RNA, 22 nt, synthetic construct
  misc_feature 1..22: note = HBV-targeting guide sequence portion
  source 1..22: mol_type = other RNA
gacgcggcgattgagatcttcg

SEQ ID NO: 15952 - RNA, 22 nt, synthetic construct
  misc_feature 1..22: note = HBV-targeting guide sequence portion
  source 1..22: mol_type = other RNA
gacggcagcctaccccgctgtc

SEQ ID NO: 15953 - RNA, 22 nt, synthetic construct
  misc_feature 1..22: note = HBV-targeting guide sequence portion
  source 1..22: mol_type = other RNA
gacgggaaacataccttgatag

SEQ ID NO: 15954 - RNA, 22 nt, synthetic construct
  misc_feature 1..22: note = HBV-targeting guide sequence portion
  source 1..22: mol_type = other RNA
gacgggacgtaaacaaaggacg

SEQ ID NO: 15955 - RNA, 22 nt, synthetic construct
  misc_feature 1..22: note = HBV-targeting guide sequence portion
  source 1..22: mol_type = other RNA
gacggggagtccgcgtaaagag

SEQ ID NO: 15956 - RNA, 22 nt, synthetic construct
  misc_feature 1..22: note = HBV-targeting guide sequence portion
  source 1..22: mol_type = other RNA
gacggttgaaattgattatgcc

SEQ ID NO: 15957 - RNA, 22 nt, synthetic construct
  misc_feature 1..22: note = HBV-targeting guide sequence portion
  source 1..22: mol_type = other RNA
gacgtaaacaaaggacgtcccg

SEQ ID NO: 15958 - RNA, 22 nt, synthetic construct
  misc_feature 1..22: note = HBV-targeting guide sequence portion
  source 1..22: mol_type = other RNA
gacgtcccgcgcaggatccagt

SEQ ID NO: 15959 - RNA, 22 nt, synthetic construct
  misc_feature 1..22: note = HBV-targeting guide sequence portion
  source 1..22: mol_type = other RNA
gacgtcctttgtttacgtcccg

SEQ ID NO: 15960 - RNA, 22 nt, synthetic construct
  misc_feature 1..22: note = HBV-targeting guide sequence portion
  source 1..22: mol_type = other RNA
gacgtgcagaggtgaagcgaag

SEQ ID NO: 15961 - RNA, 22 nt, synthetic construct
  misc_feature 1..22: note = HBV-targeting guide sequence portion
  source 1..22: mol_type = other RNA
gactactaggtccctagatgct

SEQ ID NO: 15962 - RNA, 22 nt, synthetic construct
  misc_feature 1..22: note = HBV-targeting guide sequence portion
  source 1..22: mol_type = other RNA
gactactgcctctcacatatcg

SEQ ID NO: 15963 - RNA, 22 nt, synthetic construct
  misc_feature 1..22: note = HBV-targeting guide sequence portion
  source 1..22: mol_type = other RNA
gactatcaaggtatgtttcccg

SEQ ID NO: 15964 - RNA, 22 nt, synthetic construct
  misc_feature 1..22: note = HBV-targeting guide sequence portion
  source 1..22: mol_type = other RNA
gactcaagatgctgtacagact

SEQ ID NO: 15965 - RNA, 22 nt, synthetic construct
  misc_feature 1..22: note = HBV-targeting guide sequence portion
  source 1..22: mol_type = other RNA
gactcataaggtgggaaatttt

SEQ ID NO: 15966 - RNA, 22 nt, synthetic construct
  misc_feature 1..22: note = HBV-targeting guide sequence portion
  source 1..22: mol_type = other RNA
gactccaaggcatcccgataca

SEQ ID NO: 15967 - RNA, 22 nt, synthetic construct
  misc_feature 1..22: note = HBV-targeting guide sequence portion
  source 1..22: mol_type = other RNA
gactccccgtctgtgccttctc

SEQ ID NO: 15968 - RNA, 22 nt, synthetic construct
  misc_feature 1..22: note = HBV-targeting guide sequence portion
  source 1..22: mol_type = other RNA
gactcctgctcaaggaacctct

SEQ ID NO: 15969 - RNA, 22 nt, synthetic construct
  misc_feature 1..22: note = HBV-targeting guide sequence portion
  source 1..22: mol_type = other RNA
gactcgtggtggacttctctca

SEQ ID NO: 15970 - RNA, 22 nt, synthetic construct
  misc_feature 1..22: note = HBV-targeting guide sequence portion
  source 1..22: mol_type = other RNA
gactctagctacctgggtgggt

SEQ ID NO: 15971 - RNA, 22 nt, synthetic construct
  misc_feature 1..22: note = HBV-targeting guide sequence portion
  source 1..22: mol_type = other RNA
gactctctgcaatgtcaacgac

SEQ ID NO: 15972 - RNA, 22 nt, synthetic construct
  misc_feature 1..22: note = HBV-targeting guide sequence portion
  source 1..22: mol_type = other RNA
gactctgcggtattgtgaggat

SEQ ID NO: 15973 - RNA, 22 nt, synthetic construct
  misc_feature 1..22: note = HBV-targeting guide sequence portion
  source 1..22: mol_type = other RNA
gactcttggactctctgcaatg

SEQ ID NO: 15974 - RNA, 22 nt, synthetic construct
  misc_feature 1..22: note = HBV-targeting guide sequence portion
  source 1..22: mol_type = other RNA
gactgacaactctgttgtcctc

SEQ ID NO: 15975 - RNA, 22 nt, synthetic construct
  misc_feature 1..22: note = HBV-targeting guide sequence portion
  source 1..22: mol_type = other RNA
gactgcgaattttggccaagac

SEQ ID NO: 15976 - RNA, 22 nt, synthetic construct
  misc_feature 1..22: note = HBV-targeting guide sequence portion
  source 1..22: mol_type = other RNA
gactggcgattggtagaggcag

SEQ ID NO: 15977 - RNA, 22 nt, synthetic construct
  misc_feature 1..22: note = HBV-targeting guide sequence portion
  source 1..22: mol_type = other RNA
gactgggaggagttgggggagg

SEQ ID NO: 15978 - RNA, 22 nt, synthetic construct
  misc_feature 1..22: note = HBV-targeting guide sequence portion
  source 1..22: mol_type = other RNA
gactgtttgtttaaagactggg

SEQ ID NO: 15979 - RNA, 22 nt, synthetic construct
  misc_feature 1..22: note = HBV-targeting guide sequence portion
  source 1..22: mol_type = other RNA
gacttcaatcccaacaaggatc

SEQ ID NO: 15980 - RNA, 22 nt, synthetic construct
  misc_feature 1..22: note = HBV-targeting guide sequence portion
  source 1..22: mol_type = other RNA
gacttctctcaattttctaggg

SEQ ID NO: 15981 - RNA, 22 nt, synthetic construct
  misc_feature 1..22: note = HBV-targeting guide sequence portion
  source 1..22: mol_type = other RNA
gacttctttccttccgtacgag

SEQ ID NO: 15982 - RNA, 22 nt, synthetic construct
  misc_feature 1..22: note = HBV-targeting guide sequence portion
  source 1..22: mol_type = other RNA
gacttggcccccaataccacat

SEQ ID NO: 15983 - RNA, 22 nt, synthetic construct
  misc_feature 1..22: note = HBV-targeting guide sequence portion
  source 1..22: mol_type = other RNA
gacttgtgttgttagacgacga

SEQ ID NO: 15984 - RNA, 22 nt, synthetic construct
  misc_feature 1..22: note = HBV-targeting guide sequence portion
  source 1..22: mol_type = other RNA
gagaaaagacggttgaaattga

SEQ ID NO: 15985 - RNA, 22 nt, synthetic construct
  misc_feature 1..22: note = HBV-targeting guide sequence portion
  source 1..22: mol_type = other RNA
gagaaacactcatcctcaggcc

SEQ ID NO: 15986 - RNA, 22 nt, synthetic construct
  misc_feature 1..22: note = HBV-targeting guide sequence portion
  source 1..22: mol_type = other RNA
gagaaacgggctgaggcccact

SEQ ID NO: 15987 - RNA, 22 nt, synthetic construct
  misc_feature 1..22: note = HBV-targeting guide sequence portion
  source 1..22: mol_type = other RNA
gagaaacggtcctagagtattt

SEQ ID NO: 15988 - RNA, 22 nt, synthetic construct
  misc_feature 1..22: note = HBV-targeting guide sequence portion
  source 1..22: mol_type = other RNA
gagaacatcacatcaggattcc

SEQ ID NO: 15989 - RNA, 22 nt, synthetic construct
  misc_feature 1..22: note = HBV-targeting guide sequence portion
  source 1..22: mol_type = other RNA
gagaactaatgactctagctac

SEQ ID NO: 15990 - RNA, 22 nt, synthetic construct
  misc_feature 1..22: note = HBV-targeting guide sequence portion
  source 1..22: mol_type = other RNA
gagaagaggacgacagggcccc

SEQ ID NO: 15991 - RNA, 22 nt, synthetic construct
  misc_feature 1..22: note = HBV-targeting guide sequence portion
  source 1..22: mol_type = other RNA
gagaagattgacgatatgtgag

SEQ ID NO: 15992 - RNA, 22 nt, synthetic construct
  misc_feature 1..22: note = HBV-targeting guide sequence portion
  source 1..22: mol_type = other RNA
gagaaggcacagacggggagtc

SEQ ID NO: 15993 - RNA, 22 nt, synthetic construct
  misc_feature 1..22: note = HBV-targeting guide sequence portion
  source 1..22: mol_type = other RNA
gagaagtccaccacgagtctag

SEQ ID NO: 15994 - RNA, 22 nt, synthetic construct
  misc_feature 1..22: note = HBV-targeting guide sequence portion
  source 1..22: mol_type = other RNA
gagaataaccccatctctttgt

SEQ ID NO: 15995 - RNA, 22 nt, synthetic construct
  misc_feature 1..22: note = HBV-targeting guide sequence portion
  source 1..22: mol_type = other RNA
gagaatgtttgctccagaccgg

SEQ ID NO: 15996 - RNA, 22 nt, synthetic construct
  misc_feature 1..22: note = HBV-targeting guide sequence portion
  source 1..22: mol_type = other RNA
gagacagcggggtaggctgccg

SEQ ID NO: 15997 - RNA, 22 nt, synthetic construct
  misc_feature 1..22: note = HBV-targeting guide sequence portion
  source 1..22: mol_type = other RNA
gagaccaccgtgaacgcccacc

SEQ ID NO: 15998 - RNA, 22 nt, synthetic construct
  misc_feature 1..22: note = HBV-targeting guide sequence portion
  source 1..22: mol_type = other RNA
gagactccaaggcatcccgata

SEQ ID NO: 15999 - RNA, 22 nt, synthetic construct
  misc_feature 1..22: note = HBV-targeting guide sequence portion
  source 1..22: mol_type = other RNA
gagacttgtgttgttagacgac

SEQ ID NO: 16000 - RNA, 22 nt, synthetic construct
  misc_feature 1..22: note = HBV-targeting guide sequence portion
  source 1..22: mol_type = other RNA
gagagaagtccaccacgagtct

SEQ ID NO: 16001 - RNA, 22 nt, synthetic construct
  misc_feature 1..22: note = HBV-targeting guide sequence portion
  source 1..22: mol_type = other RNA
gagaggacaacagagttgtcag

SEQ ID NO: 16002 - RNA, 22 nt, synthetic construct
  misc_feature 1..22: note = HBV-targeting guide sequence portion
  source 1..22: mol_type = other RNA
gagaggcagtagtcggaacagg

SEQ ID NO: 16003 - RNA, 22 nt, synthetic construct
  misc_feature 1..22: note = HBV-targeting guide sequence portion
  source 1..22: mol_type = other RNA
gagaggcctgtatctccctgct

SEQ ID NO: 16004 - RNA, 22 nt, synthetic construct
  misc_feature 1..22: note = HBV-targeting guide sequence portion
  source 1..22: mol_type = other RNA
gagaggtgcgccccgtggtcgg

SEQ ID NO: 16005 - RNA, 22 nt, synthetic construct
  misc_feature 1..22: note = HBV-targeting guide sequence portion
  source 1..22: mol_type = other RNA
gagagtaactccacagtagctc

SEQ ID NO: 16006 - RNA, 22 nt, synthetic construct
  misc_feature 1..22: note = HBV-targeting guide sequence portion
  source 1..22: mol_type = other RNA
gagagtccaagagtcctcttat

SEQ ID NO: 16007 - RNA, 22 nt, synthetic construct
  misc_feature 1..22: note = HBV-targeting guide sequence portion
  source 1..22: mol_type = other RNA
gagagtgtcaacacatagcgcc

SEQ ID NO: 16008 - RNA, 22 nt, synthetic construct
  misc_feature 1..22: note = HBV-targeting guide sequence portion
  source 1..22: mol_type = other RNA
gagatacaggcctctcactctg

SEQ ID NO: 16009 - RNA, 22 nt, synthetic construct
  misc_feature 1..22: note = HBV-targeting guide sequence portion
  source 1..22: mol_type = other RNA
gagatccccgagattgagatct

SEQ ID NO: 16010 - RNA, 22 nt, synthetic construct
  misc_feature 1..22: note = HBV-targeting guide sequence portion
  source 1..22: mol_type = other RNA
gagatcttcgtctgcgaggcga

SEQ ID NO: 16011 - RNA, 22 nt, synthetic construct
  misc_feature 1..22: note = HBV-targeting guide sequence portion
  source 1..22: mol_type = other RNA
gagatcttctagataccgccgc

SEQ ID NO: 16012 - RNA, 22 nt, synthetic construct
  misc_feature 1..22: note = HBV-targeting guide sequence portion
  source 1..22: mol_type = other RNA
gagatcttctgcgacgcggcga

SEQ ID NO: 16013 - RNA, 22 nt, synthetic construct
  misc_feature 1..22: note = HBV-targeting guide sequence portion
  source 1..22: mol_type = other RNA
gagatgattaggcagaggtgaa

SEQ ID NO: 16014 - RNA, 22 nt, synthetic construct
  misc_feature 1..22: note = HBV-targeting guide sequence portion
  source 1..22: mol_type = other RNA
gagatggggttattctcttaat

SEQ ID NO: 16015 - RNA, 22 nt, synthetic construct
  misc_feature 1..22: note = HBV-targeting guide sequence portion
  source 1..22: mol_type = other RNA
gagatgggtcgtccgcgggatt

SEQ ID NO: 16016 - RNA, 22 nt, synthetic construct
  misc_feature 1..22: note = HBV-targeting guide sequence portion
  source 1..22: mol_type = other RNA
gagattagattaatgatctttg

SEQ ID NO: 16017 - RNA, 22 nt, synthetic construct
  misc_feature 1..22: note = HBV-targeting guide sequence portion
  source 1..22: mol_type = other RNA
gagattgagatcttctgcgacg

SEQ ID NO: 16018 - RNA, 22 nt, synthetic construct
  misc_feature 1..22: note = HBV-targeting guide sequence portion
  source 1..22: mol_type = other RNA
gagcaaaacaagcggctaggag

SEQ ID NO: 16019 - RNA, 22 nt, synthetic construct
  misc_feature 1..22: note = HBV-targeting guide sequence portion
  source 1..22: mol_type = other RNA
gagcaaacattctcgggactga

SEQ ID NO: 16020 - RNA, 22 nt, synthetic construct
  misc_feature 1..22: note = HBV-targeting guide sequence portion
  source 1..22: mol_type = other RNA
gagcaaactccaacaatccaga

SEQ ID NO: 16021 - RNA, 22 nt, synthetic construct
  misc_feature 1..22: note = HBV-targeting guide sequence portion
  source 1..22: mol_type = other RNA
gagcaggagtcgtgcaggttct

SEQ ID NO: 16022 - RNA, 22 nt, synthetic construct
  misc_feature 1..22: note = HBV-targeting guide sequence portion
  source 1..22: mol_type = other RNA
gagcaggggtcctaggaatcct

SEQ ID NO: 16023 - RNA, 22 nt, synthetic construct
  misc_feature 1..22: note = HBV-targeting guide sequence portion
  source 1..22: mol_type = other RNA
gagcattcgggctagggttcac

SEQ ID NO: 16024 - RNA, 22 nt, synthetic construct
  misc_feature 1..22: note = HBV-targeting guide sequence portion
  source 1..22: mol_type = other RNA
gagcattgttcacctcaccata

SEQ ID NO: 16025 - RNA, 22 nt, synthetic construct
  misc_feature 1..22: note = HBV-targeting guide sequence portion
  source 1..22: mol_type = other RNA
gagccaagagaaacgggctgag

SEQ ID NO: 16026 - RNA, 22 nt, synthetic construct
  misc_feature 1..22: note = HBV-targeting guide sequence portion
  source 1..22: mol_type = other RNA
gagccaccagcagggagataca

SEQ ID NO: 16027 - RNA, 22 nt, synthetic construct
  misc_feature 1..22: note = HBV-targeting guide sequence portion
  source 1..22: mol_type = other RNA
gagccctcaggctcagggcata

SEQ ID NO: 16028 - RNA, 22 nt, synthetic construct
  misc_feature 1..22: note = HBV-targeting guide sequence portion
  source 1..22: mol_type = other RNA
gagccggaaaggttccacgcat

SEQ ID NO: 16029 - RNA, 22 nt, synthetic construct
  misc_feature 1..22: note = HBV-targeting guide sequence portion
  source 1..22: mol_type = other RNA
gagcctgagggctccaccccaa

SEQ ID NO: 16030 - RNA, 22 nt, synthetic construct
  misc_feature 1..22: note = HBV-targeting guide sequence portion
  source 1..22: mol_type = other RNA
gagctacagcatggggcagaat

SEQ ID NO: 16031 - RNA, 22 nt, synthetic construct
  misc_feature 1..22: note = HBV-targeting guide sequence portion
  source 1..22: mol_type = other RNA
gagctactgtggagttactctc

SEQ ID NO: 16032 - RNA, 22 nt, synthetic construct
  misc_feature 1..22: note = HBV-targeting guide sequence portion
  source 1..22: mol_type = other RNA
gagctgcggcggtatctagaag

SEQ ID NO: 16033 - RNA, 22 nt, synthetic construct
  misc_feature 1..22: note = HBV-targeting guide sequence portion
  source 1..22: mol_type = other RNA
gagctggagcattcgggctagg

SEQ ID NO: 16034 - RNA, 22 nt, synthetic construct
  misc_feature 1..22: note = HBV-targeting guide sequence portion
  source 1..22: mol_type = other RNA
gaggaagatgataaaacgccgc

SEQ ID NO: 16035 - RNA, 22 nt, synthetic construct
  misc_feature 1..22: note = HBV-targeting guide sequence portion
  source 1..22: mol_type = other RNA
gaggacaacagagttgtcagtc

SEQ ID NO: 16036 - RNA, 22 nt, synthetic construct
  misc_feature 1..22: note = HBV-targeting guide sequence portion
  source 1..22: mol_type = other RNA
gaggacagacgggaaacatacc

SEQ ID NO: 16037 - RNA, 22 nt, synthetic construct
  misc_feature 1..22: note = HBV-targeting guide sequence portion
  source 1..22: mol_type = other RNA
gaggacaggaggttggtgagtg

SEQ ID NO: 16038 - RNA, 22 nt, synthetic construct
  misc_feature 1..22: note = HBV-targeting guide sequence portion
  source 1..22: mol_type = other RNA
gaggacgacagggccccaagcg

SEQ ID NO: 16039 - RNA, 22 nt, synthetic construct
  misc_feature 1..22: note = HBV-targeting guide sequence portion
  source 1..22: mol_type = other RNA
gaggactcttggactctctgca

SEQ ID NO: 16040 - RNA, 22 nt, synthetic construct
  misc_feature 1..22: note = HBV-targeting guide sequence portion
  source 1..22: mol_type = other RNA
gaggagattagattaatgatct

SEQ ID NO: 16041 - RNA, 22 nt, synthetic construct
  misc_feature 1..22: note = HBV-targeting guide sequence portion
  source 1..22: mol_type = other RNA
gaggagccggaaaggttccacg

SEQ ID NO: 16042 - RNA, 22 nt, synthetic construct
  misc_feature 1..22: note = HBV-targeting guide sequence portion
  source 1..22: mol_type = other RNA
gaggagtgcgaatccacactcc

SEQ ID NO: 16043 - RNA, 22 nt, synthetic construct
  misc_feature 1..22: note = HBV-targeting guide sequence portion
  source 1..22: mol_type = other RNA
gaggagttgggggaggagatta

SEQ ID NO: 16044 - RNA, 22 nt, synthetic construct
  misc_feature 1..22: note = HBV-targeting guide sequence portion
  source 1..22: mol_type = other RNA
gaggatgagtgtttctcagagg

SEQ ID NO: 16045 - RNA, 22 nt, synthetic construct
  misc_feature 1..22: note = HBV-targeting guide sequence portion
  source 1..22: mol_type = other RNA
gaggattcttgtcaacaaggaa

SEQ ID NO: 16046 - RNA, 22 nt, synthetic construct
  misc_feature 1..22: note = HBV-targeting guide sequence portion
  source 1..22: mol_type = other RNA
gaggattgctggtggaaagatt

SEQ ID NO: 16047 - RNA, 22 nt, synthetic construct
  misc_feature 1..22: note = HBV-targeting guide sequence portion
  source 1..22: mol_type = other RNA
gaggattggggaccctgcgctg

SEQ ID NO: 16048 - RNA, 22 nt, synthetic construct
  misc_feature 1..22: note = HBV-targeting guide sequence portion
  source 1..22: mol_type = other RNA
gaggcaggaggcggatttgctg

SEQ ID NO: 16049 - RNA, 22 nt, synthetic construct
  misc_feature 1..22: note = HBV-targeting guide sequence portion
  source 1..22: mol_type = other RNA
gaggcaggtcccctagaagaag

SEQ ID NO: 16050 - RNA, 22 nt, synthetic construct
  misc_feature 1..22: note = HBV-targeting guide sequence portion
  source 1..22: mol_type = other RNA
gaggcagtagtcggaacagggt

SEQ ID NO: 16051 - RNA, 22 nt, synthetic construct
  misc_feature 1..22: note = HBV-targeting guide sequence portion
  source 1..22: mol_type = other RNA
gaggcatacttcaaagactgtt

SEQ ID NO: 16052 - RNA, 22 nt, synthetic construct
  misc_feature 1..22: note = HBV-targeting guide sequence portion
  source 1..22: mol_type = other RNA
gaggcatagcagcaggatgaag

SEQ ID NO: 16053 - RNA, 22 nt, synthetic construct
  misc_feature 1..22: note = HBV-targeting guide sequence portion
  source 1..22: mol_type = other RNA
gaggcccactcccataggaatt

SEQ ID NO: 16054 - RNA, 22 nt, synthetic construct
  misc_feature 1..22: note = HBV-targeting guide sequence portion
  source 1..22: mol_type = other RNA
gaggccgcttggggccctgtcg

SEQ ID NO: 16055 - RNA, 22 nt, synthetic construct
  misc_feature 1..22: note = HBV-targeting guide sequence portion
  source 1..22: mol_type = other RNA
gaggcctgtatctccctgctgg

SEQ ID NO: 16056 - RNA, 22 nt, synthetic construct
  misc_feature 1..22: note = HBV-targeting guide sequence portion
  source 1..22: mol_type = other RNA
gaggccttttggggtggagccc

SEQ ID NO: 16057 - RNA, 22 nt, synthetic construct
  misc_feature 1..22: note = HBV-targeting guide sequence portion
  source 1..22: mol_type = other RNA
gaggcgagggagttcttcttct

SEQ ID NO: 16058 - RNA, 22 nt, synthetic construct
  misc_feature 1..22: note = HBV-targeting guide sequence portion
  source 1..22: mol_type = other RNA
gaggcgctatgtgttgacactc

SEQ ID NO: 16059 - RNA, 22 nt, synthetic construct
  misc_feature 1..22: note = HBV-targeting guide sequence portion
  source 1..22: mol_type = other RNA
gaggcggatttgctggcaaggt

SEQ ID NO: 16060 - RNA, 22 nt, synthetic construct
  misc_feature 1..22: note = HBV-targeting guide sequence portion
  source 1..22: mol_type = other RNA
gaggctgtaggcataaattggt

SEQ ID NO: 16061 - RNA, 22 nt, synthetic construct
  misc_feature 1..22: note = HBV-targeting guide sequence portion
  source 1..22: mol_type = other RNA
gaggcttgaacagtaggacatg

SEQ ID NO: 16062 - RNA, 22 nt, synthetic construct
  misc_feature 1..22: note = HBV-targeting guide sequence portion
  source 1..22: mol_type = other RNA
gagggagttcttcttctagggg

SEQ ID NO: 16063 - RNA, 22 nt, synthetic construct
  misc_feature 1..22: note = HBV-targeting guide sequence portion
  source 1..22: mol_type = other RNA
gagggatacatagaggttcctt

SEQ ID NO: 16064 - RNA, 22 nt, synthetic construct
  misc_feature 1..22: note = HBV-targeting guide sequence portion
  source 1..22: mol_type = other RNA
gagggctccaccccaaaaggcc

SEQ ID NO: 16065 - RNA, 22 nt, synthetic construct
  misc_feature 1..22: note = HBV-targeting guide sequence portion
  source 1..22: mol_type = other RNA
gagggtgttttccaatgagggt

SEQ ID NO: 16066 - RNA, 22 nt, synthetic construct
  misc_feature 1..22: note = HBV-targeting guide sequence portion
  source 1..22: mol_type = other RNA
gagggttaaagacaggtacagt

SEQ ID NO: 16067 - RNA, 22 nt, synthetic construct
  misc_feature 1..22: note = HBV-targeting guide sequence portion
  source 1..22: mol_type = other RNA
gaggtgaaaaagttgcatggtg

SEQ ID NO: 16068 - RNA, 22 nt, synthetic construct
  misc_feature 1..22: note = HBV-targeting guide sequence portion
  source 1..22: mol_type = other RNA
gaggtgaacaatgctcaggaga

SEQ ID NO: 16069 - RNA, 22 nt, synthetic construct
  misc_feature 1..22: note = HBV-targeting guide sequence portion
  source 1..22: mol_type = other RNA
gaggtgaagcgaagtgcacacg

SEQ ID NO: 16070 - RNA, 22 nt, synthetic construct
  misc_feature 1..22: note = HBV-targeting guide sequence portion
  source 1..22: mol_type = other RNA
gaggtgcgccccgtggtcggtc

SEQ ID NO: 16071 - RNA, 22 nt, synthetic construct
  misc_feature 1..22: note = HBV-targeting guide sequence portion
  source 1..22: mol_type = other RNA
gaggtggagacagcggggtagg

SEQ ID NO: 16072 - RNA, 22 nt, synthetic construct
  misc_feature 1..22: note = HBV-targeting guide sequence portion
  source 1..22: mol_type = other RNA
gaggttccttgagcaggagtcg

SEQ ID NO: 16073 - RNA, 22 nt, synthetic construct
  misc_feature 1..22: note = HBV-targeting guide sequence portion
  source 1..22: mol_type = other RNA
gaggttggggactgcgaatttt

SEQ ID NO: 16074 - RNA, 22 nt, synthetic construct
  misc_feature 1..22: note = HBV-targeting guide sequence portion
  source 1..22: mol_type = other RNA
gaggttggtgagtgattggagg

SEQ ID NO: 16075 - RNA, 22 nt, synthetic construct
  misc_feature 1..22: note = HBV-targeting guide sequence portion
  source 1..22: mol_type = other RNA
gagtaactccacagtagctcca

SEQ ID NO: 16076 - RNA, 22 nt, synthetic construct
  misc_feature 1..22: note = HBV-targeting guide sequence portion
  source 1..22: mol_type = other RNA
gagtatttggtgtcttttggag

SEQ ID NO: 16077 - RNA, 22 nt, synthetic construct
  misc_feature 1..22: note = HBV-targeting guide sequence portion
  source 1..22: mol_type = other RNA
gagtcattagttctccccagca

SEQ ID NO: 16078 - RNA, 22 nt, synthetic construct
  misc_feature 1..22: note = HBV-targeting guide sequence portion
  source 1..22: mol_type = other RNA
gagtccaagagtcctcttatgt

SEQ ID NO: 16079 - RNA, 22 nt, synthetic construct
  misc_feature 1..22: note = HBV-targeting guide sequence portion
  source 1..22: mol_type = other RNA
gagtccaagggatactaacatt

SEQ ID NO: 16080 - RNA, 22 nt, synthetic construct
  misc_feature 1..22: note = HBV-targeting guide sequence portion
  source 1..22: mol_type = other RNA
gagtccctttataccgctgtta

SEQ ID NO: 16081 - RNA, 22 nt, synthetic construct
  misc_feature 1..22: note = HBV-targeting guide sequence portion
  source 1..22: mol_type = other RNA
gagtccgcgtaaagagaggtgc

SEQ ID NO: 16082 - RNA, 22 nt, synthetic construct
  misc_feature 1..22: note = HBV-targeting guide sequence portion
  source 1..22: mol_type = other RNA
gagtcctcttatgtaagacctt

SEQ ID NO: 16083 - RNA, 22 nt, synthetic construct
  misc_feature 1..22: note = HBV-targeting guide sequence portion
  source 1..22: mol_type = other RNA
gagtcgtgcaggttctgcaggg

SEQ ID NO: 16084 - RNA, 22 nt, synthetic construct
  misc_feature 1..22: note = HBV-targeting guide sequence portion
  source 1..22: mol_type = other RNA
gagtctagactcgtggtggact

SEQ ID NO: 16085 - RNA, 22 nt, synthetic construct
  misc_feature 1..22: note = HBV-targeting guide sequence portion
  source 1..22: mol_type = other RNA
gagtctagactctgcggtattg

SEQ ID NO: 16086 - RNA, 22 nt, synthetic construct
  misc_feature 1..22: note = HBV-targeting guide sequence portion
  source 1..22: mol_type = other RNA
gagtctcctgagcattgttcac

SEQ ID NO: 16087 - RNA, 22 nt, synthetic construct
  misc_feature 1..22: note = HBV-targeting guide sequence portion
  source 1..22: mol_type = other RNA
gagtgagaggcctgtatctccc

SEQ ID NO: 16088 - RNA, 22 nt, synthetic construct
  misc_feature 1..22: note = HBV-targeting guide sequence portion
  source 1..22: mol_type = other RNA
gagtgattggaggttggggact

SEQ ID NO: 16089 - RNA, 22 nt, synthetic construct
  misc_feature 1..22: note = HBV-targeting guide sequence portion
  source 1..22: mol_type = other RNA
gagtgcagtatggtgaggtgaa

SEQ ID NO: 16090 - RNA, 22 nt, synthetic construct
  misc_feature 1..22: note = HBV-targeting guide sequence portion
  source 1..22: mol_type = other RNA
gagtgcgaatccacactccaaa

SEQ ID NO: 16091 - RNA, 22 nt, synthetic construct
  misc_feature 1..22: note = HBV-targeting guide sequence portion
  source 1..22: mol_type = other RNA
gagtgggcctcagcccgtttct

SEQ ID NO: 16092 - RNA, 22 nt, synthetic construct
  misc_feature 1..22: note = HBV-targeting guide sequence portion
  source 1..22: mol_type = other RNA
gagtgtcaacacatagcgcctc

SEQ ID NO: 16093 - RNA, 22 nt, synthetic construct
  misc_feature 1..22: note = HBV-targeting guide sequence portion
  source 1..22: mol_type = other RNA
gagtgtggattcgcactcctcc

SEQ ID NO: 16094 - RNA, 22 nt, synthetic construct
  misc_feature 1..22: note = HBV-targeting guide sequence portion
  source 1..22: mol_type = other RNA
gagtgtgtaaatagtgtctagt

SEQ ID NO: 16095 - RNA, 22 nt, synthetic construct
  misc_feature 1..22: note = HBV-targeting guide sequence portion
  source 1..22: mol_type = other RNA
gagtgttgacataactgactac

SEQ ID NO: 16096 - RNA, 22 nt, synthetic construct
  misc_feature 1..22: note = HBV-targeting guide sequence portion
  source 1..22: mol_type = other RNA
gagtgtttctcagaggtggaga

SEQ ID NO: 16097 - RNA, 22 nt, synthetic construct
  misc_feature 1..22: note = HBV-targeting guide sequence portion
  source 1..22: mol_type = other RNA
gagttactctcgtttttgcctt

SEQ ID NO: 16098 - RNA, 22 nt, synthetic construct
  misc_feature 1..22: note = HBV-targeting guide sequence portion
  source 1..22: mol_type = other RNA
gagttccgcagtatggatcggc

SEQ ID NO: 16099 - RNA, 22 nt, synthetic construct
  misc_feature 1..22: note = HBV-targeting guide sequence portion
  source 1..22: mol_type = other RNA
gagttcttcttctaggggacct

SEQ ID NO: 16100 - RNA, 22 nt, synthetic construct
  misc_feature 1..22: note = HBV-targeting guide sequence portion
  source 1..22: mol_type = other RNA
gagttgggggaggagattagat

SEQ ID NO: 16101 - RNA, 22 nt, synthetic construct
  misc_feature 1..22: note = HBV-targeting guide sequence portion
  source 1..22: mol_type = other RNA
gagttgtcagtcccgagaatgt

SEQ ID NO: 16102 - RNA, 22 nt, synthetic construct
  misc_feature 1..22: note = HBV-targeting guide sequence portion
  source 1..22: mol_type = other RNA
gagtttgctctgaaggctgggt

SEQ ID NO: 16103 - RNA, 22 nt, synthetic construct
  misc_feature 1..22: note = HBV-targeting guide sequence portion
  source 1..22: mol_type = other RNA
gagttttctgaaacattctttg

SEQ ID NO: 16104 - RNA, 22 nt, synthetic construct
  misc_feature 1..22: note = HBV-targeting guide sequence portion
  source 1..22: mol_type = other RNA
gataaaacctagcaggcataat

SEQ ID NO: 16105 - RNA, 22 nt, synthetic construct
  misc_feature 1..22: note = HBV-targeting guide sequence portion
  source 1..22: mol_type = other RNA
gataaaacgccgcagacacatc

SEQ ID NO: 16106 - RNA, 22 nt, synthetic construct
  misc_feature 1..22: note = HBV-targeting guide sequence portion
  source 1..22: mol_type = other RNA
gataaccacattgtgtaaaagg

SEQ ID NO: 16107 - RNA, 22 nt, synthetic construct
  misc_feature 1..22: note = HBV-targeting guide sequence portion
  source 1..22: mol_type = other RNA
gataaccaggacaagttggagg

SEQ ID NO: 16108 - RNA, 22 nt, synthetic construct
  misc_feature 1..22: note = HBV-targeting guide sequence portion
  source 1..22: mol_type = other RNA
gataagggtattaaaccttatt

SEQ ID NO: 16109 - RNA, 22 nt, synthetic construct
  misc_feature 1..22: note = HBV-targeting guide sequence portion
  source 1..22: mol_type = other RNA
gataataaggtttaataccctt

SEQ ID NO: 16110 - RNA, 22 nt, synthetic construct
  misc_feature 1..22: note = HBV-targeting guide sequence portion
  source 1..22: mol_type = other RNA
gataatatcttggtgtagatgt

SEQ ID NO: 16111 - RNA, 22 nt, synthetic construct
  misc_feature 1..22: note = HBV-targeting guide sequence portion
  source 1..22: mol_type = other RNA
gatacagagctgcggcggtatc

SEQ ID NO: 16112 - RNA, 22 nt, synthetic construct
  misc_feature 1..22: note = HBV-targeting guide sequence portion
  source 1..22: mol_type = other RNA
gatacaggcctctcactctggg

SEQ ID NO: 16113 - RNA, 22 nt, synthetic construct
  misc_feature 1..22: note = HBV-targeting guide sequence portion
  source 1..22: mol_type = other RNA
gatacatagaggttccttgagc

SEQ ID NO: 16114 - RNA, 22 nt, synthetic construct
  misc_feature 1..22: note = HBV-targeting guide sequence portion
  source 1..22: mol_type = other RNA
gataccgccgcagctctgtatc

SEQ ID NO: 16115 - RNA, 22 nt, synthetic construct
  misc_feature 1..22: note = HBV-targeting guide sequence portion
  source 1..22: mol_type = other RNA
gatactaacattgagatccccg

SEQ ID NO: 16116 - RNA, 22 nt, synthetic construct
  misc_feature 1..22: note = HBV-targeting guide sequence portion
  source 1..22: mol_type = other RNA
gataggataggggcatttggtg

SEQ ID NO: 16117 - RNA, 22 nt, synthetic construct
  misc_feature 1..22: note = HBV-targeting guide sequence portion
  source 1..22: mol_type = other RNA
gataggggcatttggtggtcta

SEQ ID NO: 16118 - RNA, 22 nt, synthetic construct
  misc_feature 1..22: note = HBV-targeting guide sequence portion
  source 1..22: mol_type = other RNA
gatagtccagaagaaccaacaa

SEQ ID NO: 16119 - RNA, 22 nt, synthetic construct
  misc_feature 1..22: note = HBV-targeting guide sequence portion
  source 1..22: mol_type = other RNA
gatatgtgagaggcagtagtcg

SEQ ID NO: 16120 - RNA, 22 nt, synthetic construct
  misc_feature 1..22: note = HBV-targeting guide sequence portion
  source 1..22: mol_type = other RNA
gatattatcaaaaaatgtgaac

SEQ ID NO: 16121 - RNA, 22 nt, synthetic construct
  misc_feature 1..22: note = HBV-targeting guide sequence portion
  source 1..22: mol_type = other RNA
gatcaagcatctagggacctag

SEQ ID NO: 16122 - RNA, 22 nt, synthetic construct
  misc_feature 1..22: note = HBV-targeting guide sequence portion
  source 1..22: mol_type = other RNA
gatcatcaaccaccagcacggg

SEQ ID NO: 16123 - RNA, 22 nt, synthetic construct
  misc_feature 1..22: note = HBV-targeting guide sequence portion
  source 1..22: mol_type = other RNA
gatcattaatctaatctcctcc

SEQ ID NO: 16124 - RNA, 22 nt, synthetic construct
  misc_feature 1..22: note = HBV-targeting guide sequence portion
  source 1..22: mol_type = other RNA
gatcattgccacaaaatcacat

SEQ ID NO: 16125 - RNA, 22 nt, synthetic construct
  misc_feature 1..22: note = HBV-targeting guide sequence portion
  source 1..22: mol_type = other RNA
gatccagttggcagcacagcct

SEQ ID NO: 16126 - RNA, 22 nt, synthetic construct
  misc_feature 1..22: note = HBV-targeting guide sequence portion
  source 1..22: mol_type = other RNA
gatccatactgcggaactccta

SEQ ID NO: 16127 - RNA, 22 nt, synthetic construct
  misc_feature 1..22: note = HBV-targeting guide sequence portion
  source 1..22: mol_type = other RNA
gatcccagagtgagaggcctgt

SEQ ID NO: 16128 - RNA, 22 nt, synthetic construct
  misc_feature 1..22: note = HBV-targeting guide sequence portion
  source 1..22: mol_type = other RNA
gatccccaacaatcaatgacat

SEQ ID NO: 16129 - RNA, 22 nt, synthetic construct
  misc_feature 1..22: note = HBV-targeting guide sequence portion
  source 1..22: mol_type = other RNA
gatccccgagattgagatcttc

SEQ ID NO: 16130 - RNA, 22 nt, synthetic construct
  misc_feature 1..22: note = HBV-targeting guide sequence portion
  source 1..22: mol_type = other RNA
gatccctggccagacgccaaca

SEQ ID NO: 16131 - RNA, 22 nt, synthetic construct
  misc_feature 1..22: note = HBV-targeting guide sequence portion
  source 1..22: mol_type = other RNA
gatcctgcgcgggacgtccttt

SEQ ID NO: 16132 - RNA, 22 nt, synthetic construct
  misc_feature 1..22: note = HBV-targeting guide sequence portion
  source 1..22: mol_type = other RNA
gatcctggaattagaggacaga

SEQ ID NO: 16133 - RNA, 22 nt, synthetic construct
  misc_feature 1..22: note = HBV-targeting guide sequence portion
  source 1..22: mol_type = other RNA
gatccttgttgggattgaagtc

SEQ ID NO: 16134 - RNA, 22 nt, synthetic construct
  misc_feature 1..22: note = HBV-targeting guide sequence portion
  source 1..22: mol_type = other RNA
gatcggcagaggagccggaaag

SEQ ID NO: 16135 - RNA, 22 nt, synthetic construct
  misc_feature 1..22: note = HBV-targeting guide sequence portion
  source 1..22: mol_type = other RNA
gatctcaatcgccgcgtcgcag

SEQ ID NO: 16136 - RNA, 22 nt, synthetic construct
  misc_feature 1..22: note = HBV-targeting guide sequence portion
  source 1..22: mol_type = other RNA
gatctcaatctcggggatctca

SEQ ID NO: 16137 - RNA, 22 nt, synthetic construct
  misc_feature 1..22: note = HBV-targeting guide sequence portion
  source 1..22: mol_type = other RNA
gatctcaatgttagtatccctt

SEQ ID NO: 16138 - RNA, 22 nt, synthetic construct
  misc_feature 1..22: note = HBV-targeting guide sequence portion
  source 1..22: mol_type = other RNA
gatctcgtacggaaggaaagaa

SEQ ID NO: 16139 - RNA, 22 nt, synthetic construct
  misc_feature 1..22: note = HBV-targeting guide sequence portion
  source 1..22: mol_type = other RNA
gatcttcgtctgcgaggcgagg

SEQ ID NO: 16140 - RNA, 22 nt, synthetic construct
  misc_feature 1..22: note = HBV-targeting guide sequence portion
  source 1..22: mol_type = other RNA
gatcttctaaattagtacccac

SEQ ID NO: 16141 - RNA, 22 nt, synthetic construct
  misc_feature 1..22: note = HBV-targeting guide sequence portion
  source 1..22: mol_type = other RNA
gatcttctagataccgccgcag

SEQ ID NO: 16142 - RNA, 22 nt, synthetic construct
  misc_feature 1..22: note = HBV-targeting guide sequence portion
  source 1..22: mol_type = other RNA
gatcttctgcgacgcggcgatt

SEQ ID NO: 16143 - RNA, 22 nt, synthetic construct
  misc_feature 1..22: note = HBV-targeting guide sequence portion
  source 1..22: mol_type = other RNA
gatcttgcagagtttggtggaa

SEQ ID NO: 16144 - RNA, 22 nt, synthetic construct
  misc_feature 1..22: note = HBV-targeting guide sequence portion
  source 1..22: mol_type = other RNA
gatctttgtactaggaggctgt

SEQ ID NO: 16145 - RNA, 22 nt, synthetic construct
  misc_feature 1..22: note = HBV-targeting guide sequence portion
  source 1..22: mol_type = other RNA
gatgaagaggaagatgataaaa

SEQ ID NO: 16146 - RNA, 22 nt, synthetic construct
  misc_feature 1..22: note = HBV-targeting guide sequence portion
  source 1..22: mol_type = other RNA
gatgagaaggcacagacgggga

SEQ ID NO: 16147 - RNA, 22 nt, synthetic construct
  misc_feature 1..22: note = HBV-targeting guide sequence portion
  source 1..22: mol_type = other RNA
gatgaggcatagcagcaggatg

SEQ ID NO: 16148 - RNA, 22 nt, synthetic construct
  misc_feature 1..22: note = HBV-targeting guide sequence portion
  source 1..22: mol_type = other RNA
gatgagtgtttctcagaggtgg

SEQ ID NO: 16149 - RNA, 22 nt, synthetic construct
  misc_feature 1..22: note = HBV-targeting guide sequence portion
  source 1..22: mol_type = other RNA
gatgataaaacgccgcagacac

SEQ ID NO: 16150 - RNA, 22 nt, synthetic construct
  misc_feature 1..22: note = HBV-targeting guide sequence portion
  source 1..22: mol_type = other RNA
gatgatcctggaattagaggac

SEQ ID NO: 16151 - RNA, 22 nt, synthetic construct
  misc_feature 1..22: note = HBV-targeting guide sequence portion
  source 1..22: mol_type = other RNA
gatgatgggatgggaatacagg

SEQ ID NO: 16152 - RNA, 22 nt, synthetic construct
  misc_feature 1..22: note = HBV-targeting guide sequence portion
  source 1..22: mol_type = other RNA
gatgatgtggtattgggggcca

SEQ ID NO: 16153 - RNA, 22 nt, synthetic construct
  misc_feature 1..22: note = HBV-targeting guide sequence portion
  source 1..22: mol_type = other RNA
gatgattaggcagaggtgaaaa

SEQ ID NO: 16154 - RNA, 22 nt, synthetic construct
  misc_feature 1..22: note = HBV-targeting guide sequence portion
  source 1..22: mol_type = other RNA
gatgcaacccccactggttggg

SEQ ID NO: 16155 - RNA, 22 nt, synthetic construct
  misc_feature 1..22: note = HBV-targeting guide sequence portion
  source 1..22: mol_type = other RNA
gatgccttggagtctcctgagc

SEQ ID NO: 16156 - RNA, 22 nt, synthetic construct
  misc_feature 1..22: note = HBV-targeting guide sequence portion
  source 1..22: mol_type = other RNA
gatgctgtacagacttggcccc

SEQ ID NO: 16157 - RNA, 22 nt, synthetic construct
  misc_feature 1..22: note = HBV-targeting guide sequence portion
  source 1..22: mol_type = other RNA
gatgcttgatcttctaaattag

SEQ ID NO: 16158 - RNA, 22 nt, synthetic construct
  misc_feature 1..22: note = HBV-targeting guide sequence portion
  source 1..22: mol_type = other RNA
gatggaaactgcacctgtattc

SEQ ID NO: 16159 - RNA, 22 nt, synthetic construct
  misc_feature 1..22: note = HBV-targeting guide sequence portion
  source 1..22: mol_type = other RNA
gatggcctatgaccaagcccca

SEQ ID NO: 16160 - RNA, 22 nt, synthetic construct
  misc_feature 1..22: note = HBV-targeting guide sequence portion
  source 1..22: mol_type = other RNA
gatgggaatacaggtgcagttt

SEQ ID NO: 16161 - RNA, 22 nt, synthetic construct
  misc_feature 1..22: note = HBV-targeting guide sequence portion
  source 1..22: mol_type = other RNA
gatgggatgggaatacaggtgc

SEQ ID NO: 16162 - RNA, 22 nt, synthetic construct
  misc_feature 1..22: note = HBV-targeting guide sequence portion
  source 1..22: mol_type = other RNA
gatggggttattctcttaattt

SEQ ID NO: 16163 - RNA, 22 nt, synthetic construct
  misc_feature 1..22: note = HBV-targeting guide sequence portion
  source 1..22: mol_type = other RNA
gatgggtcgtccgcgggattca

SEQ ID NO: 16164 - RNA, 22 nt, synthetic construct
  misc_feature 1..22: note = HBV-targeting guide sequence portion
  source 1..22: mol_type = other RNA
gatgtatattaggaaaagaggg

SEQ ID NO: 16165 - RNA, 22 nt, synthetic construct
  misc_feature 1..22: note = HBV-targeting guide sequence portion
  source 1..22: mol_type = other RNA
gatgtatatttgcgggagagga

SEQ ID NO: 16166 - RNA, 22 nt, synthetic construct
  misc_feature 1..22: note = HBV-targeting guide sequence portion
  source 1..22: mol_type = other RNA
gatgtgatgttctccatgttca

SEQ ID NO: 16167 - RNA, 22 nt, synthetic construct
  misc_feature 1..22: note = HBV-targeting guide sequence portion
  source 1..22: mol_type = other RNA
gatgtgattttgtggcaatgat

SEQ ID NO: 16168 - RNA, 22 nt, synthetic construct
  misc_feature 1..22: note = HBV-targeting guide sequence portion
  source 1..22: mol_type = other RNA
gatgtggtattgggggccaagt

SEQ ID NO: 16169 - RNA, 22 nt, synthetic construct
  misc_feature 1..22: note = HBV-targeting guide sequence portion
  source 1..22: mol_type = other RNA
gatgtgtctgcggcgttttatc

SEQ ID NO: 16170 - RNA, 22 nt, synthetic construct
  misc_feature 1..22: note = HBV-targeting guide sequence portion
  source 1..22: mol_type = other RNA
gatgttctccatgttcagcgca

SEQ ID NO: 16171 - RNA, 22 nt, synthetic construct
  misc_feature 1..22: note = HBV-targeting guide sequence portion
  source 1..22: mol_type = other RNA
gatgttctggataataaggttt

SEQ ID NO: 16172 - RNA, 22 nt, synthetic construct
  misc_feature 1..22: note = HBV-targeting guide sequence portion
  source 1..22: mol_type = other RNA
gattaactagatgttctggata

SEQ ID NO: 16173 - RNA, 22 nt, synthetic construct
  misc_feature 1..22: note = HBV-targeting guide sequence portion
  source 1..22: mol_type = other RNA
gattaatgatctttgtactagg

SEQ ID NO: 16174 - RNA, 22 nt, synthetic construct
  misc_feature 1..22: note = HBV-targeting guide sequence portion
  source 1..22: mol_type = other RNA
gattagattaatgatctttgta

SEQ ID NO: 16175 - RNA, 22 nt, synthetic construct
  misc_feature 1..22: note = HBV-targeting guide sequence portion
  source 1..22: mol_type = other RNA
gattaggcagaggtgaaaaagt

SEQ ID NO: 16176 - RNA, 22 nt, synthetic construct
  misc_feature 1..22: note = HBV-targeting guide sequence portion
  source 1..22: mol_type = other RNA
gattatgcctgctaggttttat

SEQ ID NO: 16177 - RNA, 22 nt, synthetic construct
  misc_feature 1..22: note = HBV-targeting guide sequence portion
  source 1..22: mol_type = other RNA
gattcagcgccgacgggacgta

SEQ ID NO: 16178 - RNA, 22 nt, synthetic construct
  misc_feature 1..22: note = HBV-targeting guide sequence portion
  source 1..22: mol_type = other RNA
gattcctaggacccctgctcgt

SEQ ID NO: 16179 - RNA, 22 nt, synthetic construct
  misc_feature 1..22: note = HBV-targeting guide sequence portion
  source 1..22: mol_type = other RNA
gattcgcactcctccagcttat

SEQ ID NO: 16180 - RNA, 22 nt, synthetic construct
  misc_feature 1..22: note = HBV-targeting guide sequence portion
  source 1..22: mol_type = other RNA
gattctgccccatgctgtagct

SEQ ID NO: 16181 - RNA, 22 nt, synthetic construct
  misc_feature 1..22: note = HBV-targeting guide sequence portion
  source 1..22: mol_type = other RNA
gattcttgtcaacaaggaaaac

SEQ ID NO: 16182 - RNA, 22 nt, synthetic construct
  misc_feature 1..22: note = HBV-targeting guide sequence portion
  source 1..22: mol_type = other RNA
gattctttcccgaccaccagtt

SEQ ID NO: 16183 - RNA, 22 nt, synthetic construct
  misc_feature 1..22: note = HBV-targeting guide sequence portion
  source 1..22: mol_type = other RNA
gattgaagtcccaatctggatt

SEQ ID NO: 16184 - RNA, 22 nt, synthetic construct
  misc_feature 1..22: note = HBV-targeting guide sequence portion
  source 1..22: mol_type = other RNA
gattgaatacatgcatacaagg

SEQ ID NO: 16185 - RNA, 22 nt, synthetic construct
  misc_feature 1..22: note = HBV-targeting guide sequence portion
  source 1..22: mol_type = other RNA
gattgacgatatgtgagaggca

SEQ ID NO: 16186 - RNA, 22 nt, synthetic construct
  misc_feature 1..22: note = HBV-targeting guide sequence portion
  source 1..22: mol_type = other RNA
gattgagatcttcgtctgcgag

SEQ ID NO: 16187 - RNA, 22 nt, synthetic construct
  misc_feature 1..22: note = HBV-targeting guide sequence portion
  source 1..22: mol_type = other RNA
gattgagatcttctgcgacgcg

SEQ ID NO: 16188 - RNA, 22 nt, synthetic construct
  misc_feature 1..22: note = HBV-targeting guide sequence portion
  source 1..22: mol_type = other RNA
gattgctggtggaaagattctg

SEQ ID NO: 16189 - RNA, 22 nt, synthetic construct
  misc_feature 1..22: note = HBV-targeting guide sequence portion
  source 1..22: mol_type = other RNA
gattggaaagtgtgtcaacgaa

SEQ ID NO: 16190 - RNA, 22 nt, synthetic construct
  misc_feature 1..22: note = HBV-targeting guide sequence portion
  source 1..22: mol_type = other RNA
gattggaggttggggactgcga

SEQ ID NO: 16191 - RNA, 22 nt, synthetic construct
  misc_feature 1..22: note = HBV-targeting guide sequence portion
  source 1..22: mol_type = other RNA
gattgggacttcaatcccaaca

SEQ ID NO: 16192 - RNA, 22 nt, synthetic construct
  misc_feature 1..22: note = HBV-targeting guide sequence portion
  source 1..22: mol_type = other RNA
gattggggaccctgcgctgaac

SEQ ID NO: 16193 - RNA, 22 nt, synthetic construct
  misc_feature 1..22: note = HBV-targeting guide sequence portion
  source 1..22: mol_type = other RNA
gattggtagaggcaggaggcgg

SEQ ID NO: 16194 - RNA, 22 nt, synthetic construct
  misc_feature 1..22: note = HBV-targeting guide sequence portion
  source 1..22: mol_type = other RNA
gattgttggagtttgctctgaa

SEQ ID NO: 16195 - RNA, 22 nt, synthetic construct
  misc_feature 1..22: note = HBV-targeting guide sequence portion
  source 1..22: mol_type = other RNA
gattgttggggatcattgccac

SEQ ID NO: 16196 - RNA, 22 nt, synthetic construct
  misc_feature 1..22: note = HBV-targeting guide sequence portion
  source 1..22: mol_type = other RNA
gatttgctggcaaggtttgcat

SEQ ID NO: 16197 - RNA, 22 nt, synthetic construct
  misc_feature 1..22: note = HBV-targeting guide sequence portion
  source 1..22: mol_type = other RNA
gattttgtggcaatgatcccca

SEQ ID NO: 16198 - RNA, 22 nt, synthetic construct
  misc_feature 1..22: note = HBV-targeting guide sequence portion
  source 1..22: mol_type = other RNA
gattttgtgtatgatgtgattt

SEQ ID NO: 16199 - RNA, 22 nt, synthetic construct
  misc_feature 1..22: note = HBV-targeting guide sequence portion
  source 1..22: mol_type = other RNA
gcaaaaacgagagtaactccac

SEQ ID NO: 16200 - RNA, 22 nt, synthetic construct
  misc_feature 1..22: note = HBV-targeting guide sequence portion
  source 1..22: mol_type = other RNA
gcaaaacaagcggctaggagtt

SEQ ID NO: 16201 - RNA, 22 nt, synthetic construct
  misc_feature 1..22: note = HBV-targeting guide sequence portion
  source 1..22: mol_type = other RNA
gcaaaacccagaagacccacaa

SEQ ID NO: 16202 - RNA, 22 nt, synthetic construct
  misc_feature 1..22: note = HBV-targeting guide sequence portion
  source 1..22: mol_type = other RNA
gcaaacacttggcacagacctg

SEQ ID NO: 16203 - RNA, 22 nt, synthetic construct
  misc_feature 1..22: note = HBV-targeting guide sequence portion
  source 1..22: mol_type = other RNA
gcaaacattctcgggactgaca

SEQ ID NO: 16204 - RNA, 22 nt, synthetic construct
  misc_feature 1..22: note = HBV-targeting guide sequence portion
  source 1..22: mol_type = other RNA
gcaaaccttgccagcaaatccg

SEQ ID NO: 16205 - RNA, 22 nt, synthetic construct
  misc_feature 1..22: note = HBV-targeting guide sequence portion
  source 1..22: mol_type = other RNA
gcaaactccaacaatccagatt

SEQ ID NO: 16206 - RNA, 22 nt, synthetic construct
  misc_feature 1..22: note = HBV-targeting guide sequence portion
  source 1..22: mol_type = other RNA
gcaaagaattgcttgcctgagt

SEQ ID NO: 16207 - RNA, 22 nt, synthetic construct
  misc_feature 1..22: note = HBV-targeting guide sequence portion
  source 1..22: mol_type = other RNA
gcaaatatacatcgttcccatg

SEQ ID NO: 16208 - RNA, 22 nt, synthetic construct
  misc_feature 1..22: note = HBV-targeting guide sequence portion
  source 1..22: mol_type = other RNA
gcaaatccgcctcctgcctcta

SEQ ID NO: 16209 - RNA, 22 nt, synthetic construct
  misc_feature 1..22: note = HBV-targeting guide sequence portion
  source 1..22: mol_type = other RNA
gcaacaggagggatacatagag

SEQ ID NO: 16210 - RNA, 22 nt, synthetic construct
  misc_feature 1..22: note = HBV-targeting guide sequence portion
  source 1..22: mol_type = other RNA
gcaacccccactggttggggct

SEQ ID NO: 16211 - RNA, 22 nt, synthetic construct
  misc_feature 1..22: note = HBV-targeting guide sequence portion
  source 1..22: mol_type = other RNA
gcaacggccaggtctgtgccaa

SEQ ID NO: 16212 - RNA, 22 nt, synthetic construct
  misc_feature 1..22: note = HBV-targeting guide sequence portion
  source 1..22: mol_type = other RNA
gcaacggggtaaaggttcaggt

SEQ ID NO: 16213 - RNA, 22 nt, synthetic construct
  misc_feature 1..22: note = HBV-targeting guide sequence portion
  source 1..22: mol_type = other RNA
gcaactttttcacctctgccta

SEQ ID NO: 16214 - RNA, 22 nt, synthetic construct
  misc_feature 1..22: note = HBV-targeting guide sequence portion
  source 1..22: mol_type = other RNA
gcaagaattggtgggcgttcac

SEQ ID NO: 16215 - RNA, 22 nt, synthetic construct
  misc_feature 1..22: note = HBV-targeting guide sequence portion
  source 1..22: mol_type = other RNA
gcaagatcccagagtgagaggc

SEQ ID NO: 16216 - RNA, 22 nt, synthetic construct
  misc_feature 1..22: note = HBV-targeting guide sequence portion
  source 1..22: mol_type = other RNA
gcaagcaattctttgctgggga

SEQ ID NO: 16217 - RNA, 22 nt, synthetic construct
  misc_feature 1..22: note = HBV-targeting guide sequence portion
  source 1..22: mol_type = other RNA
gcaaggtttgcattatgccctg

SEQ ID NO: 16218 - RNA, 22 nt, synthetic construct
  misc_feature 1..22: note = HBV-targeting guide sequence portion
  source 1..22: mol_type = other RNA
gcaagtatttggtgaatttagg

SEQ ID NO: 16219 - RNA, 22 nt, synthetic construct
  misc_feature 1..22: note = HBV-targeting guide sequence portion
  source 1..22: mol_type = other RNA
gcaatcctctgggattctttcc

SEQ ID NO: 16220 - RNA, 22 nt, synthetic construct
  misc_feature 1..22: note = HBV-targeting guide sequence portion
  source 1..22: mol_type = other RNA
gcaatgatccccaacaatcaat

SEQ ID NO: 16221 - RNA, 22 nt, synthetic construct
  misc_feature 1..22: note = HBV-targeting guide sequence portion
  source 1..22: mol_type = other RNA
gcaatgtcaacgaccgaccttg

SEQ ID NO: 16222 - RNA, 22 nt, synthetic construct
  misc_feature 1..22: note = HBV-targeting guide sequence portion
  source 1..22: mol_type = other RNA
gcaattctttgctggggagaac

SEQ ID NO: 16223 - RNA, 22 nt, synthetic construct
  misc_feature 1..22: note = HBV-targeting guide sequence portion
  source 1..22: mol_type = other RNA
gcacacggtccggcagatgaga

SEQ ID NO: 16224 - RNA, 22 nt, synthetic construct
  misc_feature 1..22: note = HBV-targeting guide sequence portion
  source 1..22: mol_type = other RNA
gcacagacctggccgttgcctg

SEQ ID NO: 16225 - RNA, 22 nt, synthetic construct
  misc_feature 1..22: note = HBV-targeting guide sequence portion
  source 1..22: mol_type = other RNA
gcacagacggggagtccgcgta

SEQ ID NO: 16226 - RNA, 22 nt, synthetic construct
  misc_feature 1..22: note = HBV-targeting guide sequence portion
  source 1..22: mol_type = other RNA
gcacagcctagcagccatggga

SEQ ID NO: 16227 - RNA, 22 nt, synthetic construct
  misc_feature 1..22: note = HBV-targeting guide sequence portion
  source 1..22: mol_type = other RNA
gcacagcttggaggcttgaaca

SEQ ID NO: 16228 - RNA, 22 nt, synthetic construct
  misc_feature 1..22: note = HBV-targeting guide sequence portion
  source 1..22: mol_type = other RNA
gcaccagcaccatgcaactttt

SEQ ID NO: 16229 - RNA, 22 nt, synthetic construct
  misc_feature 1..22: note = HBV-targeting guide sequence portion
  source 1..22: mol_type = other RNA
gcaccatgcaactttttcacct

SEQ ID NO: 16230 - RNA, 22 nt, synthetic construct
  misc_feature 1..22: note = HBV-targeting guide sequence portion
  source 1..22: mol_type = other RNA
gcacctctctttacgcggactc

SEQ ID NO: 16231 - RNA, 22 nt, synthetic construct
  misc_feature 1..22: note = HBV-targeting guide sequence portion
  source 1..22: mol_type = other RNA
gcacctgtattcccatcccatc

SEQ ID NO: 16232 - RNA, 22 nt, synthetic construct
  misc_feature 1..22: note = HBV-targeting guide sequence portion
  source 1..22: mol_type = other RNA
gcacgactcctgctcaaggaac

SEQ ID NO: 16233 - RNA, 22 nt, synthetic construct
  misc_feature 1..22: note = HBV-targeting guide sequence portion
  source 1..22: mol_type = other RNA
gcacggaggccttttggggtgg

SEQ ID NO: 16234 - RNA, 22 nt, synthetic construct
  misc_feature 1..22: note = HBV-targeting guide sequence portion
  source 1..22: mol_type = other RNA
gcacgggaccctgcagaacctg

SEQ ID NO: 16235 - RNA, 22 nt, synthetic construct
  misc_feature 1..22: note = HBV-targeting guide sequence portion
  source 1..22: mol_type = other RNA
gcacgtcgcatggagaccaccg

SEQ ID NO: 16236 - RNA, 22 nt, synthetic construct
  misc_feature 1..22: note = HBV-targeting guide sequence portion
  source 1..22: mol_type = other RNA
gcactagtaaactgagccaaga

SEQ ID NO: 16237 - RNA, 22 nt, synthetic construct
  misc_feature 1..22: note = HBV-targeting guide sequence portion
  source 1..22: mol_type = other RNA
gcactcaggcaagcaattcttt

SEQ ID NO: 16238 - RNA, 22 nt, synthetic construct
  misc_feature 1..22: note = HBV-targeting guide sequence portion
  source 1..22: mol_type = other RNA
gcactcctccagcttatagacc

SEQ ID NO: 16239 - RNA, 22 nt, synthetic construct
  misc_feature 1..22: note = HBV-targeting guide sequence portion
  source 1..22: mol_type = other RNA
gcacttcgcttcacctctgcac

SEQ ID NO: 16240 - RNA, 22 nt, synthetic construct
  misc_feature 1..22: note = HBV-targeting guide sequence portion
  source 1..22: mol_type = other RNA
gcagaacctgcacgactcctgc

SEQ ID NO: 16241 - RNA, 22 nt, synthetic construct
  misc_feature 1..22: note = HBV-targeting guide sequence portion
  source 1..22: mol_type = other RNA
gcagaagatctcaatctcgggg

SEQ ID NO: 16242 - RNA, 22 nt, synthetic construct
  misc_feature 1..22: note = HBV-targeting guide sequence portion
  source 1..22: mol_type = other RNA
gcagaatctttccaccagcaat

SEQ ID NO: 16243 - RNA, 22 nt, synthetic construct
  misc_feature 1..22: note = HBV-targeting guide sequence portion
  source 1..22: mol_type = other RNA
gcagacacatccagcgataacc

SEQ ID NO: 16244 - RNA, 22 nt, synthetic construct
  misc_feature 1..22: note = HBV-targeting guide sequence portion
  source 1..22: mol_type = other RNA
gcagaccaatttatgcctacag

SEQ ID NO: 16245 - RNA, 22 nt, synthetic construct
  misc_feature 1..22: note = HBV-targeting guide sequence portion
  source 1..22: mol_type = other RNA
gcagacgaagatctcaatcgcc

SEQ ID NO: 16246 - RNA, 22 nt, synthetic construct
  misc_feature 1..22: note = HBV-targeting guide sequence portion
  source 1..22: mol_type = other RNA
gcagagaagaggacgacagggc

SEQ ID NO: 16247 - RNA, 22 nt, synthetic construct
  misc_feature 1..22: note = HBV-targeting guide sequence portion
  source 1..22: mol_type = other RNA
gcagagagtccaagagtcctct

SEQ ID NO: 16248 - RNA, 22 nt, synthetic construct
  misc_feature 1..22: note = HBV-targeting guide sequence portion
  source 1..22: mol_type = other RNA
gcagaggagccggaaaggttcc

SEQ ID NO: 16249 - RNA, 22 nt, synthetic construct
  misc_feature 1..22: note = HBV-targeting guide sequence portion
  source 1..22: mol_type = other RNA
gcagaggtgaaaaagttgcatg

SEQ ID NO: 16250 - RNA, 22 nt, synthetic construct
  misc_feature 1..22: note = HBV-targeting guide sequence portion
  source 1..22: mol_type = other RNA
gcagaggtgaagcgaagtgcac

SEQ ID NO: 16251 - RNA, 22 nt, synthetic construct
  misc_feature 1..22: note = HBV-targeting guide sequence portion
  source 1..22: mol_type = other RNA
gcagagtctagactcgtggtgg

SEQ ID NO: 16252 - RNA, 22 nt, synthetic construct
  misc_feature 1..22: note = HBV-targeting guide sequence portion
  source 1..22: mol_type = other RNA
gcagagtttggtggaaggttgt

SEQ ID NO: 16253 - RNA, 22 nt, synthetic construct
  misc_feature 1..22: note = HBV-targeting guide sequence portion
  source 1..22: mol_type = other RNA
gcagatgagaaggcacagacgg

SEQ ID NO: 16254 - RNA, 22 nt, synthetic construct
  misc_feature 1..22: note = HBV-targeting guide sequence portion
  source 1..22: mol_type = other RNA
gcagcaaaacccagaagaccca

SEQ ID NO: 16255 - RNA, 22 nt, synthetic construct
  misc_feature 1..22: note = HBV-targeting guide sequence portion
  source 1..22: mol_type = other RNA
gcagcacagcctagcagccatg

SEQ ID NO: 16256 - RNA, 22 nt, synthetic construct
  misc_feature 1..22: note = HBV-targeting guide sequence portion
  source 1..22: mol_type = other RNA
gcagcaggatgaagaggaagat

SEQ ID NO: 16257 - RNA, 22 nt, synthetic construct
  misc_feature 1..22: note = HBV-targeting guide sequence portion
  source 1..22: mol_type = other RNA
gcagccatgggaacgatgtata

SEQ ID NO: 16258 - RNA, 22 nt, synthetic construct
  misc_feature 1..22: note = HBV-targeting guide sequence portion
  source 1..22: mol_type = other RNA
gcagccggtctggagcaaacat

SEQ ID NO: 16259 - RNA, 22 nt, synthetic construct
  misc_feature 1..22: note = HBV-targeting guide sequence portion
  source 1..22: mol_type = other RNA
gcagcctaccccgctgtctcca

SEQ ID NO: 16260 - RNA, 22 nt, synthetic construct
  misc_feature 1..22: note = HBV-targeting guide sequence portion
  source 1..22: mol_type = other RNA
gcagctctgtatcgggatgcct

SEQ ID NO: 16261 - RNA, 22 nt, synthetic construct
  misc_feature 1..22: note = HBV-targeting guide sequence portion
  source 1..22: mol_type = other RNA
gcaggaggcggatttgctggca

SEQ ID NO: 16262 - RNA, 22 nt, synthetic construct
  misc_feature 1..22: note = HBV-targeting guide sequence portion
  source 1..22: mol_type = other RNA
gcaggagtcgtgcaggttctgc

SEQ ID NO: 16263 - RNA, 22 nt, synthetic construct
  misc_feature 1..22: note = HBV-targeting guide sequence portion
  source 1..22: mol_type = other RNA
gcaggataaccacattgtgtaa

SEQ ID NO: 16264 - RNA, 22 nt, synthetic construct
  misc_feature 1..22: note = HBV-targeting guide sequence portion
  source 1..22: mol_type = other RNA
gcaggatccagttggcagcaca

SEQ ID NO: 16265 - RNA, 22 nt, synthetic construct
  misc_feature 1..22: note = HBV-targeting guide sequence portion
  source 1..22: mol_type = other RNA
gcaggatgaagaggaagatgat

SEQ ID NO: 16266 - RNA, 22 nt, synthetic construct
  misc_feature 1..22: note = HBV-targeting guide sequence portion
  source 1..22: mol_type = other RNA
gcaggcagagaagaggacgaca

SEQ ID NO: 16267 - RNA, 22 nt, synthetic construct
  misc_feature 1..22: note = HBV-targeting guide sequence portion
  source 1..22: mol_type = other RNA
gcaggcataatcaatttcaacc

SEQ ID NO: 16268 - RNA, 22 nt, synthetic construct
  misc_feature 1..22: note = HBV-targeting guide sequence portion
  source 1..22: mol_type = other RNA
gcaggctttcactttttcgcca

SEQ ID NO: 16269 - RNA, 22 nt, synthetic construct
  misc_feature 1..22: note = HBV-targeting guide sequence portion
  source 1..22: mol_type = other RNA
gcagggagatacaggcctctca

SEQ ID NO: 16270 - RNA, 22 nt, synthetic construct
  misc_feature 1..22: note = HBV-targeting guide sequence portion
  source 1..22: mol_type = other RNA
gcaggggtcctaggaatcctga

SEQ ID NO: 16271 - RNA, 22 nt, synthetic construct
  misc_feature 1..22: note = HBV-targeting guide sequence portion
  source 1..22: mol_type = other RNA
gcagggtccccaatcctcgaga

SEQ ID NO: 16272 - RNA, 22 nt, synthetic construct
  misc_feature 1..22: note = HBV-targeting guide sequence portion
  source 1..22: mol_type = other RNA
gcagggtcccgtgctggtggtt

SEQ ID NO: 16273 - RNA, 22 nt, synthetic construct
  misc_feature 1..22: note = HBV-targeting guide sequence portion
  source 1..22: mol_type = other RNA
gcaggtcccctagaagaagaac

SEQ ID NO: 16274 - RNA, 22 nt, synthetic construct
  misc_feature 1..22: note = HBV-targeting guide sequence portion
  source 1..22: mol_type = other RNA
gcaggttctgcagggtcccgtg

SEQ ID NO: 16275 - RNA, 22 nt, synthetic construct
  misc_feature 1..22: note = HBV-targeting guide sequence portion
  source 1..22: mol_type = other RNA
gcagtagtcggaacagggttta

SEQ ID NO: 16276 - RNA, 22 nt, synthetic construct
  misc_feature 1..22: note = HBV-targeting guide sequence portion
  source 1..22: mol_type = other RNA
gcagtatggatcggcagaggag

SEQ ID NO: 16277 - RNA, 22 nt, synthetic construct
  misc_feature 1..22: note = HBV-targeting guide sequence portion
  source 1..22: mol_type = other RNA
gcagtatggtgaggtgaacaat

SEQ ID NO: 16278 - RNA, 22 nt, synthetic construct
  misc_feature 1..22: note = HBV-targeting guide sequence portion
  source 1..22: mol_type = other RNA
gcagtccccaacctccaatcac

SEQ ID NO: 16279 - RNA, 22 nt, synthetic construct
  misc_feature 1..22: note = HBV-targeting guide sequence portion
  source 1..22: mol_type = other RNA
gcagtttccatccgaaggtttt

SEQ ID NO: 16280 - RNA, 22 nt, synthetic construct
  misc_feature 1..22: note = HBV-targeting guide sequence portion
  source 1..22: mol_type = other RNA
gcataaattggtctgcgcacca

SEQ ID NO: 16281 - RNA, 22 nt, synthetic construct
  misc_feature 1..22: note = HBV-targeting guide sequence portion
  source 1..22: mol_type = other RNA
gcataatcaatttcaaccgtct

SEQ ID NO: 16282 - RNA, 22 nt, synthetic construct
  misc_feature 1..22: note = HBV-targeting guide sequence portion
  source 1..22: mol_type = other RNA
gcataatgcaaaccttgccagc

SEQ ID NO: 16283 - RNA, 22 nt, synthetic construct
  misc_feature 1..22: note = HBV-targeting guide sequence portion
  source 1..22: mol_type = other RNA
gcatacaagggcattaaagcag

SEQ ID NO: 16284 - RNA, 22 nt, synthetic construct
  misc_feature 1..22: note = HBV-targeting guide sequence portion
  source 1..22: mol_type = other RNA
gcatacttcaaagactgtttgt

SEQ ID NO: 16285 - RNA, 22 nt, synthetic construct
  misc_feature 1..22: note = HBV-targeting guide sequence portion
  source 1..22: mol_type = other RNA
gcatagcagcaggatgaagagg

SEQ ID NO: 16286 - RNA, 22 nt, synthetic construct
  misc_feature 1..22: note = HBV-targeting guide sequence portion
  source 1..22: mol_type = other RNA
gcatcagcaaacacttggcaca

SEQ ID NO: 16287 - RNA, 22 nt, synthetic construct
  misc_feature 1..22: note = HBV-targeting guide sequence portion
  source 1..22: mol_type = other RNA
gcatcccgatacagagctgcgg

SEQ ID NO: 16288 - RNA, 22 nt, synthetic construct
  misc_feature 1..22: note = HBV-targeting guide sequence portion
  source 1..22: mol_type = other RNA
gcatctagggacctagtagtca

SEQ ID NO: 16289 - RNA, 22 nt, synthetic construct
  misc_feature 1..22: note = HBV-targeting guide sequence portion
  source 1..22: mol_type = other RNA
gcatcttgagtccctttatacc

SEQ ID NO: 16290 - RNA, 22 nt, synthetic construct
  misc_feature 1..22: note = HBV-targeting guide sequence portion
  source 1..22: mol_type = other RNA
gcatgcgctgatggcctatgac

SEQ ID NO: 16291 - RNA, 22 nt, synthetic construct
  misc_feature 1..22: note = HBV-targeting guide sequence portion
  source 1..22: mol_type = other RNA
gcatgcgtggaacctttccggc

SEQ ID NO: 16292 - RNA, 22 nt, synthetic construct
  misc_feature 1..22: note = HBV-targeting guide sequence portion
  source 1..22: mol_type = other RNA
gcatggacattgacccatataa

SEQ ID NO: 16293 - RNA, 22 nt, synthetic construct
  misc_feature 1..22: note = HBV-targeting guide sequence portion
  source 1..22: mol_type = other RNA
gcatggagaccaccgtgaacgc

SEQ ID NO: 16294 - RNA, 22 nt, synthetic construct
  misc_feature 1..22: note = HBV-targeting guide sequence portion
  source 1..22: mol_type = other RNA
gcatggcctgaggatgagtgtt

SEQ ID NO: 16295 - RNA, 22 nt, synthetic construct
  misc_feature 1..22: note = HBV-targeting guide sequence portion
  source 1..22: mol_type = other RNA
gcatggggcagaatctttccac

SEQ ID NO: 16296 - RNA, 22 nt, synthetic construct
  misc_feature 1..22: note = HBV-targeting guide sequence portion
  source 1..22: mol_type = other RNA
gcatggtgctggtgcgcagacc

SEQ ID NO: 16297 - RNA, 22 nt, synthetic construct
  misc_feature 1..22: note = HBV-targeting guide sequence portion
  source 1..22: mol_type = other RNA
gcatgtattcaatctaagcagg

SEQ ID NO: 16298 - RNA, 22 nt, synthetic construct
  misc_feature 1..22: note = HBV-targeting guide sequence portion
  source 1..22: mol_type = other RNA
gcattaaagcaggataaccaca

SEQ ID NO: 16299 - RNA, 22 nt, synthetic construct
  misc_feature 1..22: note = HBV-targeting guide sequence portion
  source 1..22: mol_type = other RNA
gcattatgccctgagcctgagg

SEQ ID NO: 16300 - RNA, 22 nt, synthetic construct
  misc_feature 1..22: note = HBV-targeting guide sequence portion
  source 1..22: mol_type = other RNA
gcattcgggctagggttcaccc

SEQ ID NO: 16301 - RNA, 22 nt, synthetic construct
  misc_feature 1..22: note = HBV-targeting guide sequence portion
  source 1..22: mol_type = other RNA
gcattgttcacctcaccatact

SEQ ID NO: 16302 - RNA, 22 nt, synthetic construct
  misc_feature 1..22: note = HBV-targeting guide sequence portion
  source 1..22: mol_type = other RNA
gcatttggtggtctataagctg

SEQ ID NO: 16303 - RNA, 22 nt, synthetic construct
  misc_feature 1..22: note = HBV-targeting guide sequence portion
  source 1..22: mol_type = other RNA
gccaaaattcgcagtccccaac

SEQ ID NO: 16304 - RNA, 22 nt, synthetic construct
  misc_feature 1..22: note = HBV-targeting guide sequence portion
  source 1..22: mol_type = other RNA
gccaaacagtgggggaaagccc

SEQ ID NO: 16305 - RNA, 22 nt, synthetic construct
  misc_feature 1..22: note = HBV-targeting guide sequence portion
  source 1..22: mol_type = other RNA
gccaacaaggtaggagctggag

SEQ ID NO: 16306 - RNA, 22 nt, synthetic construct
  misc_feature 1..22: note = HBV-targeting guide sequence portion
  source 1..22: mol_type = other RNA
gccaactggatcctgcgcggga

SEQ ID NO: 16307 - RNA, 22 nt, synthetic construct
  misc_feature 1..22: note = HBV-targeting guide sequence portion
  source 1..22: mol_type = other RNA
gccaacttacaaggcctttctg

SEQ ID NO: 16308 - RNA, 22 nt, synthetic construct
  misc_feature 1..22: note = HBV-targeting guide sequence portion
  source 1..22: mol_type = other RNA
gccaagacacacggtagttccc

SEQ ID NO: 16309 - RNA, 22 nt, synthetic construct
  misc_feature 1..22: note = HBV-targeting guide sequence portion
  source 1..22: mol_type = other RNA
gccaagagaaacgggctgaggc

SEQ ID NO: 16310 - RNA, 22 nt, synthetic construct
  misc_feature 1..22: note = HBV-targeting guide sequence portion
  source 1..22: mol_type = other RNA
gccaagtctgtacagcatcttg

SEQ ID NO: 16311 - RNA, 22 nt, synthetic construct
  misc_feature 1..22: note = HBV-targeting guide sequence portion
  source 1..22: mol_type = other RNA
gccaagtgtttgctgatgcaac

SEQ ID NO: 16312 - RNA, 22 nt, synthetic construct
  misc_feature 1..22: note = HBV-targeting guide sequence portion
  source 1..22: mol_type = other RNA
gccacaaaatcacatcatacac

SEQ ID NO: 16313 - RNA, 22 nt, synthetic construct
  misc_feature 1..22: note = HBV-targeting guide sequence portion
  source 1..22: mol_type = other RNA
gccaccagcagggagatacagg

SEQ ID NO: 16314 - RNA, 22 nt, synthetic construct
  misc_feature 1..22: note = HBV-targeting guide sequence portion
  source 1..22: mol_type = other RNA
gccacccaaggcacagcttgga

SEQ ID NO: 16315 - RNA, 22 nt, synthetic construct
  misc_feature 1..22: note = HBV-targeting guide sequence portion
  source 1..22: mol_type = other RNA
gccagacgccaacaaggtagga

SEQ ID NO: 16316 - RNA, 22 nt, synthetic construct
  misc_feature 1..22: note = HBV-targeting guide sequence portion
  source 1..22: mol_type = other RNA
gccagcaaatccgcctcctgcc

SEQ ID NO: 16317 - RNA, 22 nt, synthetic construct
  misc_feature 1..22: note = HBV-targeting guide sequence portion
  source 1..22: mol_type = other RNA
gccaggcaacggccaggtctgt

SEQ ID NO: 16318 - RNA, 22 nt, synthetic construct
  misc_feature 1..22: note = HBV-targeting guide sequence portion
  source 1..22: mol_type = other RNA
gccagggatccttgttgggatt

SEQ ID NO: 16319 - RNA, 22 nt, synthetic construct
  misc_feature 1..22: note = HBV-targeting guide sequence portion
  source 1..22: mol_type = other RNA
gccaggtctgtgccaagtgttt

SEQ ID NO: 16320 - RNA, 22 nt, synthetic construct
  misc_feature 1..22: note = HBV-targeting guide sequence portion
  source 1..22: mol_type = other RNA
gccagtcaggacggcagcctac

SEQ ID NO: 16321 - RNA, 22 nt, synthetic construct
  misc_feature 1..22: note = HBV-targeting guide sequence portion
  source 1..22: mol_type = other RNA
gccatcagcgcatgcgtggaac

SEQ ID NO: 16322 - RNA, 22 nt, synthetic construct
  misc_feature 1..22: note = HBV-targeting guide sequence portion
  source 1..22: mol_type = other RNA
gccatgggaacgatgtatattt

SEQ ID NO: 16323 - RNA, 22 nt, synthetic construct
  misc_feature 1..22: note = HBV-targeting guide sequence portion
  source 1..22: mol_type = other RNA
gccatttgttcagtggttcgta

SEQ ID NO: 16324 - RNA, 22 nt, synthetic construct
  misc_feature 1..22: note = HBV-targeting guide sequence portion
  source 1..22: mol_type = other RNA
gcccaaggtcttacataagagg

SEQ ID NO: 16325 - RNA, 22 nt, synthetic construct
  misc_feature 1..22: note = HBV-targeting guide sequence portion
  source 1..22: mol_type = other RNA
gcccaccaattcttgcccaagg

SEQ ID NO: 16326 - RNA, 22 nt, synthetic construct
  misc_feature 1..22: note = HBV-targeting guide sequence portion
  source 1..22: mol_type = other RNA
gcccactcccataggaattttc

SEQ ID NO: 16327 - RNA, 22 nt, synthetic construct
  misc_feature 1..22: note = HBV-targeting guide sequence portion
  source 1..22: mol_type = other RNA
gcccaggatgatgggatgggaa

SEQ ID NO: 16328 - RNA, 22 nt, synthetic construct
  misc_feature 1..22: note = HBV-targeting guide sequence portion
  source 1..22: mol_type = other RNA
gcccatatgagtgttgacataa

SEQ ID NO: 16329 - RNA, 22 nt, synthetic construct
  misc_feature 1..22: note = HBV-targeting guide sequence portion
  source 1..22: mol_type = other RNA
gcccatgaaattaagagaataa

SEQ ID NO: 16330 - RNA, 22 nt, synthetic construct
  misc_feature 1..22: note = HBV-targeting guide sequence portion
  source 1..22: mol_type = other RNA
gccccaaccagtgggggttgca

SEQ ID NO: 16331 - RNA, 22 nt, synthetic construct
  misc_feature 1..22: note = HBV-targeting guide sequence portion
  source 1..22: mol_type = other RNA
gccccaagcggcctcgagatgg

SEQ ID NO: 16332 - RNA, 22 nt, synthetic construct
  misc_feature 1..22: note = HBV-targeting guide sequence portion
  source 1..22: mol_type = other RNA
gccccatgctgtagctcttgtt

SEQ ID NO: 16333 - RNA, 22 nt, synthetic construct
  misc_feature 1..22: note = HBV-targeting guide sequence portion
  source 1..22: mol_type = other RNA
gcccccaataccacatcatcca

SEQ ID NO: 16334 - RNA, 22 nt, synthetic construct
  misc_feature 1..22: note = HBV-targeting guide sequence portion
  source 1..22: mol_type = other RNA
gccccgtaaaatttcccacctt

SEQ ID NO: 16335 - RNA, 22 nt, synthetic construct
  misc_feature 1..22: note = HBV-targeting guide sequence portion
  source 1..22: mol_type = other RNA
gccccgtggtcggtcggaacgg

SEQ ID NO: 16336 - RNA, 22 nt, synthetic construct
  misc_feature 1..22: note = HBV-targeting guide sequence portion
  source 1..22: mol_type = other RNA
gcccctatcctatcaacacttc

SEQ ID NO: 16337 - RNA, 22 nt, synthetic construct
  misc_feature 1..22: note = HBV-targeting guide sequence portion
  source 1..22: mol_type = other RNA
gccccttttacacaatgtggtt

SEQ ID NO: 16338 - RNA, 22 nt, synthetic construct
  misc_feature 1..22: note = HBV-targeting guide sequence portion
  source 1..22: mol_type = other RNA
gcccgaatgctccagctcctac

SEQ ID NO: 16339 - RNA, 22 nt, synthetic construct
  misc_feature 1..22: note = HBV-targeting guide sequence portion
  source 1..22: mol_type = other RNA
gcccgcttacagttaatgagaa

SEQ ID NO: 16340 - RNA, 22 nt, synthetic construct
  misc_feature 1..22: note = HBV-targeting guide sequence portion
  source 1..22: mol_type = other RNA
gcccgtttctcttggctcagtt

SEQ ID NO: 16341 - RNA, 22 nt, synthetic construct
  misc_feature 1..22: note = HBV-targeting guide sequence portion
  source 1..22: mol_type = other RNA
gccctaaagccacccaaggcac

SEQ ID NO: 16342 - RNA, 22 nt, synthetic construct
  misc_feature 1..22: note = HBV-targeting guide sequence portion
  source 1..22: mol_type = other RNA
gccctacgaaccactgaacaaa

SEQ ID NO: 16343 - RNA, 22 nt, synthetic construct
  misc_feature 1..22: note = HBV-targeting guide sequence portion
  source 1..22: mol_type = other RNA
gccctcaggctcagggcataat

SEQ ID NO: 16344 - RNA, 22 nt, synthetic construct
  misc_feature 1..22: note = HBV-targeting guide sequence portion
  source 1..22: mol_type = other RNA
gccctgagcctgagggctccac

SEQ ID NO: 16345 - RNA, 22 nt, synthetic construct
  misc_feature 1..22: note = HBV-targeting guide sequence portion
  source 1..22: mol_type = other RNA
gccctgtcgtcctcttctctgc

SEQ ID NO: 16346 - RNA, 22 nt, synthetic construct
  misc_feature 1..22: note = HBV-targeting guide sequence portion
  source 1..22: mol_type = other RNA
gcccttggataagggtattaaa

SEQ ID NO: 16347 - RNA, 22 nt, synthetic construct
  misc_feature 1..22: note = HBV-targeting guide sequence portion
  source 1..22: mol_type = other RNA
gcccttgtatgcatgtattcaa

SEQ ID NO: 16348 - RNA, 22 nt, synthetic construct
  misc_feature 1..22: note = HBV-targeting guide sequence portion
  source 1..22: mol_type = other RNA
gccgacgggacgtaaacaaagg

SEQ ID NO: 16349 - RNA, 22 nt, synthetic construct
  misc_feature 1..22: note = HBV-targeting guide sequence portion
  source 1..22: mol_type = other RNA
gccgatccatactgcggaactc

SEQ ID NO: 16350 - RNA, 22 nt, synthetic construct
  misc_feature 1..22: note = HBV-targeting guide sequence portion
  source 1..22: mol_type = other RNA
gccgcagacacatccagcgata

SEQ ID NO: 16351 - RNA, 22 nt, synthetic construct
  misc_feature 1..22: note = HBV-targeting guide sequence portion
  source 1..22: mol_type = other RNA
gccgcagctctgtatcgggatg

SEQ ID NO: 16352 - RNA, 22 nt, synthetic construct
  misc_feature 1..22: note = HBV-targeting guide sequence portion
  source 1..22: mol_type = other RNA
gccgcgtcgcagaagatctcaa

SEQ ID NO: 16353 - RNA, 22 nt, synthetic construct
  misc_feature 1..22: note = HBV-targeting guide sequence portion
  source 1..22: mol_type = other RNA
gccgcttggggccctgtcgtcc

SEQ ID NO: 16354 - RNA, 22 nt, synthetic construct
  misc_feature 1..22: note = HBV-targeting guide sequence portion
  source 1..22: mol_type = other RNA
gccgcttgttttgctcgcagcc

SEQ ID NO: 16355 - RNA, 22 nt, synthetic construct
  misc_feature 1..22: note = HBV-targeting guide sequence portion
  source 1..22: mol_type = other RNA
gccggaaaggttccacgcatgc

SEQ ID NO: 16356 - RNA, 22 nt, synthetic construct
  misc_feature 1..22: note = HBV-targeting guide sequence portion
  source 1..22: mol_type = other RNA
gccggaccgtgtgcacttcgct

SEQ ID NO: 16357 - RNA, 22 nt, synthetic construct
  misc_feature 1..22: note = HBV-targeting guide sequence portion
  source 1..22: mol_type = other RNA
gccggtctggagcaaacattct

SEQ ID NO: 16358 - RNA, 22 nt, synthetic construct
  misc_feature 1..22: note = HBV-targeting guide sequence portion
  source 1..22: mol_type = other RNA
gccgtcctgactggcgattggt

SEQ ID NO: 16359 - RNA, 22 nt, synthetic construct
  misc_feature 1..22: note = HBV-targeting guide sequence portion
  source 1..22: mol_type = other RNA
gccgttccgaccgaccacgggg

SEQ ID NO: 16360 - RNA, 22 nt, synthetic construct
  misc_feature 1..22: note = HBV-targeting guide sequence portion
  source 1..22: mol_type = other RNA
gccgttgcctggcaacggggta

SEQ ID NO: 16361 - RNA, 22 nt, synthetic construct
  misc_feature 1..22: note = HBV-targeting guide sequence portion
  source 1..22: mol_type = other RNA
gcctaaagttcagacaactatt

SEQ ID NO: 16362 - RNA, 22 nt, synthetic construct
  misc_feature 1..22: note = HBV-targeting guide sequence portion
  source 1..22: mol_type = other RNA
gcctaatcatctcttgttcatg

SEQ ID NO: 16363 - RNA, 22 nt, synthetic construct
  misc_feature 1..22: note = HBV-targeting guide sequence portion
  source 1..22: mol_type = other RNA
gcctacaaactgttcacatttt

SEQ ID NO: 16364 - RNA, 22 nt, synthetic construct
  misc_feature 1..22: note = HBV-targeting guide sequence portion
  source 1..22: mol_type = other RNA
gcctacagcctcctagtacaaa

SEQ ID NO: 16365 - RNA, 22 nt, synthetic construct
  misc_feature 1..22: note = HBV-targeting guide sequence portion
  source 1..22: mol_type = other RNA
gcctaccccgctgtctccacct

SEQ ID NO: 16366 - RNA, 22 nt, synthetic construct
  misc_feature 1..22: note = HBV-targeting guide sequence portion
  source 1..22: mol_type = other RNA
gcctagcagccatgggaacgat

SEQ ID NO: 16367 - RNA, 22 nt, synthetic construct
  misc_feature 1..22: note = HBV-targeting guide sequence portion
  source 1..22: mol_type = other RNA
gcctatgaccaagccccaacca

SEQ ID NO: 16368 - RNA, 22 nt, synthetic construct
  misc_feature 1..22: note = HBV-targeting guide sequence portion
  source 1..22: mol_type = other RNA
gcctattgattggaaagtgtgt

SEQ ID NO: 16369 - RNA, 22 nt, synthetic construct
  misc_feature 1..22: note = HBV-targeting guide sequence portion
  source 1..22: mol_type = other RNA
gcctcaaggtcggtcgttgaca

SEQ ID NO: 16370 - RNA, 22 nt, synthetic construct
  misc_feature 1..22: note = HBV-targeting guide sequence portion
  source 1..22: mol_type = other RNA
gcctcagcccgtttctcttggc

SEQ ID NO: 16371 - RNA, 22 nt, synthetic construct
  misc_feature 1..22: note = HBV-targeting guide sequence portion
  source 1..22: mol_type = other RNA
gcctcatcttcttgttggttct

SEQ ID NO: 16372 - RNA, 22 nt, synthetic construct
  misc_feature 1..22: note = HBV-targeting guide sequence portion
  source 1..22: mol_type = other RNA
gcctcattctgtgggtcaccat

SEQ ID NO: 16373 - RNA, 22 nt, synthetic construct
  misc_feature 1..22: note = HBV-targeting guide sequence portion
  source 1..22: mol_type = other RNA
gcctccaagctgtgccttgggt

SEQ ID NO: 16374 - RNA, 22 nt, synthetic construct
  misc_feature 1..22: note = HBV-targeting guide sequence portion
  source 1..22: mol_type = other RNA
gcctccgtgcggtggggtgaac

SEQ ID NO: 16375 - RNA, 22 nt, synthetic construct
  misc_feature 1..22: note = HBV-targeting guide sequence portion
  source 1..22: mol_type = other RNA
gcctcctagtacaaagatcatt

SEQ ID NO: 16376 - RNA, 22 nt, synthetic construct
  misc_feature 1..22: note = HBV-targeting guide sequence portion
  source 1..22: mol_type = other RNA
gcctcctgcctctaccaatcgc

SEQ ID NO: 16377 - RNA, 22 nt, synthetic construct
  misc_feature 1..22: note = HBV-targeting guide sequence portion
  source 1..22: mol_type = other RNA
gcctcgagatgggtcgtccgcg

SEQ ID NO: 16378 - RNA, 22 nt, synthetic construct
  misc_feature 1..22: note = HBV-targeting guide sequence portion
  source 1..22: mol_type = other RNA
gcctcgcagacgaagatctcaa

SEQ ID NO: 16379 - RNA, 22 nt, synthetic construct
  misc_feature 1..22: note = HBV-targeting guide sequence portion
  source 1..22: mol_type = other RNA
gcctcgtcgtctaacaacacaa

SEQ ID NO: 16380 - RNA, 22 nt, synthetic construct
  misc_feature 1..22: note = HBV-targeting guide sequence portion
  source 1..22: mol_type = other RNA
gcctctaccaatcgccagtcag

SEQ ID NO: 16381 - RNA, 22 nt, synthetic construct
  misc_feature 1..22: note = HBV-targeting guide sequence portion
  source 1..22: mol_type = other RNA
gcctctcacatatcgtcaatct

SEQ ID NO: 16382 - RNA, 22 nt, synthetic construct
  misc_feature 1..22: note = HBV-targeting guide sequence portion
  source 1..22: mol_type = other RNA
gcctctcactctgggatcttgc

SEQ ID NO: 16383 - RNA, 22 nt, synthetic construct
  misc_feature 1..22: note = HBV-targeting guide sequence portion
  source 1..22: mol_type = other RNA
gcctgaggatgagtgtttctca

SEQ ID NO: 16384 - RNA, 22 nt, synthetic construct
  misc_feature 1..22: note = HBV-targeting guide sequence portion
  source 1..22: mol_type = other RNA
gcctgagggctccaccccaaaa

SEQ ID NO: 16385 - RNA, 22 nt, synthetic construct
  misc_feature 1..22: note = HBV-targeting guide sequence portion
  source 1..22: mol_type = other RNA
gcctgagtgcagtatggtgagg

SEQ ID NO: 16386 - RNA, 22 nt, synthetic construct
  misc_feature 1..22: note = HBV-targeting guide sequence portion
  source 1..22: mol_type = other RNA
gcctgccgttccgaccgaccac

SEQ ID NO: 16387 - RNA, 22 nt, synthetic construct
  misc_feature 1..22: note = HBV-targeting guide sequence portion
  source 1..22: mol_type = other RNA
gcctgctaggttttatcctaaa

SEQ ID NO: 16388 - RNA, 22 nt, synthetic construct
  misc_feature 1..22: note = HBV-targeting guide sequence portion
  source 1..22: mol_type = other RNA
gcctgcttagattgaatacatg

SEQ ID NO: 16389 - RNA, 22 nt, synthetic construct
  misc_feature 1..22: note = HBV-targeting guide sequence portion
  source 1..22: mol_type = other RNA
gcctggcaacggggtaaaggtt

SEQ ID NO: 16390 - RNA, 22 nt, synthetic construct
  misc_feature 1..22: note = HBV-targeting guide sequence portion
  source 1..22: mol_type = other RNA
gcctgtaacacgagcaggggtc

SEQ ID NO: 16391 - RNA, 22 nt, synthetic construct
  misc_feature 1..22: note = HBV-targeting guide sequence portion
  source 1..22: mol_type = other RNA
gcctgtatctccctgctggtgg

SEQ ID NO: 16392 - RNA, 22 nt, synthetic construct
  misc_feature 1..22: note = HBV-targeting guide sequence portion
  source 1..22: mol_type = other RNA
gcctgttaaccgggagttttct

SEQ ID NO: 16393 - RNA, 22 nt, synthetic construct
  misc_feature 1..22: note = HBV-targeting guide sequence portion
  source 1..22: mol_type = other RNA
gccttcagagcaaactccaaca

SEQ ID NO: 16394 - RNA, 22 nt, synthetic construct
  misc_feature 1..22: note = HBV-targeting guide sequence portion
  source 1..22: mol_type = other RNA
gccttccatagagtgtgtaaat

SEQ ID NO: 16395 - RNA, 22 nt, synthetic construct
  misc_feature 1..22: note = HBV-targeting guide sequence portion
  source 1..22: mol_type = other RNA
gccttctcatctgccggaccgt

SEQ ID NO: 16396 - RNA, 22 nt, synthetic construct
  misc_feature 1..22: note = HBV-targeting guide sequence portion
  source 1..22: mol_type = other RNA
gccttctgacttctttccttcc

SEQ ID NO: 16397 - RNA, 22 nt, synthetic construct
  misc_feature 1..22: note = HBV-targeting guide sequence portion
  source 1..22: mol_type = other RNA
gccttggagtctcctgagcatt

SEQ ID NO: 16398 - RNA, 22 nt, synthetic construct
  misc_feature 1..22: note = HBV-targeting guide sequence portion
  source 1..22: mol_type = other RNA
gccttgggtggctttagggcat

SEQ ID NO: 16399 - RNA, 22 nt, synthetic construct
  misc_feature 1..22: note = HBV-targeting guide sequence portion
  source 1..22: mol_type = other RNA
gccttgtaagttggcgaaaaag

SEQ ID NO: 16400 - RNA, 22 nt, synthetic construct
  misc_feature 1..22: note = HBV-targeting guide sequence portion
  source 1..22: mol_type = other RNA
gcctttctgtgtaaacaatacc

SEQ ID NO: 16401 - RNA, 22 nt, synthetic construct
  misc_feature 1..22: note = HBV-targeting guide sequence portion
  source 1..22: mol_type = other RNA
gccttttggggtggagccctca

SEQ ID NO: 16402 - RNA, 22 nt, synthetic construct
  misc_feature 1..22: note = HBV-targeting guide sequence portion
  source 1..22: mol_type = other RNA
gcgaaaaagtgaaagcctgctt

SEQ ID NO: 16403 - RNA, 22 nt, synthetic construct
  misc_feature 1..22: note = HBV-targeting guide sequence portion
  source 1..22: mol_type = other RNA
gcgaagtgcacacggtccggca

SEQ ID NO: 16404 - RNA, 22 nt, synthetic construct
  misc_feature 1..22: note = HBV-targeting guide sequence portion
  source 1..22: mol_type = other RNA
gcgaatccacactccaaaagac

SEQ ID NO: 16405 - RNA, 22 nt, synthetic construct
  misc_feature 1..22: note = HBV-targeting guide sequence portion
  source 1..22: mol_type = other RNA
gcgaattttggccaagacacac

SEQ ID NO: 16406 - RNA, 22 nt, synthetic construct
  misc_feature 1..22: note = HBV-targeting guide sequence portion
  source 1..22: mol_type = other RNA
gcgacgcggcgattgagatctt

SEQ ID NO: 16407 - RNA, 22 nt, synthetic construct
  misc_feature 1..22: note = HBV-targeting guide sequence portion
  source 1..22: mol_type = other RNA
gcgacgtgcagaggtgaagcga

SEQ ID NO: 16408 - RNA, 22 nt, synthetic construct
  misc_feature 1..22: note = HBV-targeting guide sequence portion
  source 1..22: mol_type = other RNA
gcgagcaaaacaagcggctagg

SEQ ID NO: 16409 - RNA, 22 nt, synthetic construct
  misc_feature 1..22: note = HBV-targeting guide sequence portion
  source 1..22: mol_type = other RNA
gcgaggcgagggagttcttctt

SEQ ID NO: 16410 - RNA, 22 nt, synthetic construct
  misc_feature 1..22: note = HBV-targeting guide sequence portion
  source 1..22: mol_type = other RNA
gcgagggagttcttcttctagg

SEQ ID NO: 16411 - RNA, 22 nt, synthetic construct
  misc_feature 1..22: note = HBV-targeting guide sequence portion
  source 1..22: mol_type = other RNA
gcgataaccaggacaagttgga

SEQ ID NO: 16412 - RNA, 22 nt, synthetic construct
  misc_feature 1..22: note = HBV-targeting guide sequence portion
  source 1..22: mol_type = other RNA
gcgattgagatcttcgtctgcg

SEQ ID NO: 16413 - RNA, 22 nt, synthetic construct
  misc_feature 1..22: note = HBV-targeting guide sequence portion
  source 1..22: mol_type = other RNA
gcgattggtagaggcaggaggc

SEQ ID NO: 16414 - RNA, 22 nt, synthetic construct
  misc_feature 1..22: note = HBV-targeting guide sequence portion
  source 1..22: mol_type = other RNA
gcgcaccagcaccatgcaactt

SEQ ID NO: 16415 - RNA, 22 nt, synthetic construct
  misc_feature 1..22: note = HBV-targeting guide sequence portion
  source 1..22: mol_type = other RNA
gcgcacctctctttacgcggac

SEQ ID NO: 16416 - RNA, 22 nt, synthetic construct
  misc_feature 1..22: note = HBV-targeting guide sequence portion
  source 1..22: mol_type = other RNA
gcgcagaccaatttatgcctac

SEQ ID NO: 16417 - RNA, 22 nt, synthetic construct
  misc_feature 1..22: note = HBV-targeting guide sequence portion
  source 1..22: mol_type = other RNA
gcgcaggatccagttggcagca

SEQ ID NO: 16418 - RNA, 22 nt, synthetic construct
  misc_feature 1..22: note = HBV-targeting guide sequence portion
  source 1..22: mol_type = other RNA
gcgcagggtccccaatcctcga

SEQ ID NO: 16419 - RNA, 22 nt, synthetic construct
  misc_feature 1..22: note = HBV-targeting guide sequence portion
  source 1..22: mol_type = other RNA
gcgcatgcgtggaacctttccg

SEQ ID NO: 16420 - RNA, 22 nt, synthetic construct
  misc_feature 1..22: note = HBV-targeting guide sequence portion
  source 1..22: mol_type = other RNA
gcgccccgtggtcggtcggaac

SEQ ID NO: 16421 - RNA, 22 nt, synthetic construct
  misc_feature 1..22: note = HBV-targeting guide sequence portion
  source 1..22: mol_type = other RNA
gcgccgacgggacgtaaacaaa

SEQ ID NO: 16422 - RNA, 22 nt, synthetic construct
  misc_feature 1..22: note = HBV-targeting guide sequence portion
  source 1..22: mol_type = other RNA
gcgcctcattctgtgggtcacc

SEQ ID NO: 16423 - RNA, 22 nt, synthetic construct
  misc_feature 1..22: note = HBV-targeting guide sequence portion
  source 1..22: mol_type = other RNA
gcgcgggacgtcctttgtttac

SEQ ID NO: 16424 - RNA, 22 nt, synthetic construct
  misc_feature 1..22: note = HBV-targeting guide sequence portion
  source 1..22: mol_type = other RNA
gcgctatgtgttgacactctct

SEQ ID NO: 16425 - RNA, 22 nt, synthetic construct
  misc_feature 1..22: note = HBV-targeting guide sequence portion
  source 1..22: mol_type = other RNA
gcgctgaacatggagaacatca

SEQ ID NO: 16426 - RNA, 22 nt, synthetic construct
  misc_feature 1..22: note = HBV-targeting guide sequence portion
  source 1..22: mol_type = other RNA
gcgctgaatcccgcggacgacc

SEQ ID NO: 16427 - RNA, 22 nt, synthetic construct
  misc_feature 1..22: note = HBV-targeting guide sequence portion
  source 1..22: mol_type = other RNA
gcgctgatggcctatgaccaag

SEQ ID NO: 16428 - RNA, 22 nt, synthetic construct
  misc_feature 1..22: note = HBV-targeting guide sequence portion
  source 1..22: mol_type = other RNA
gcggaactcctagccgcttgtt

SEQ ID NO: 16429 - RNA, 22 nt, synthetic construct
  misc_feature 1..22: note = HBV-targeting guide sequence portion
  source 1..22: mol_type = other RNA
gcggacgacccatctcgaggcc

SEQ ID NO: 16430 - RNA, 22 nt, synthetic construct
  misc_feature 1..22: note = HBV-targeting guide sequence portion
  source 1..22: mol_type = other RNA
gcggactccccgtctgtgcctt

SEQ ID NO: 16431 - RNA, 22 nt, synthetic construct
  misc_feature 1..22: note = HBV-targeting guide sequence portion
  source 1..22: mol_type = other RNA
gcggatttgctggcaaggtttg

SEQ ID NO: 16432 - RNA, 22 nt, synthetic construct
  misc_feature 1..22: note = HBV-targeting guide sequence portion
  source 1..22: mol_type = other RNA
gcggcctcgagatgggtcgtcc

SEQ ID NO: 16433 - RNA, 22 nt, synthetic construct
  misc_feature 1..22: note = HBV-targeting guide sequence portion
  source 1..22: mol_type = other RNA
gcggcgattgagatcttcgtct

SEQ ID NO: 16434 - RNA, 22 nt, synthetic construct
  misc_feature 1..22: note = HBV-targeting guide sequence portion
  source 1..22: mol_type = other RNA
gcggcggtatctagaagatctc

SEQ ID NO: 16435 - RNA, 22 nt, synthetic construct
  misc_feature 1..22: note = HBV-targeting guide sequence portion
  source 1..22: mol_type = other RNA
gcggcgttttatcatcttcctc

SEQ ID NO: 16436 - RNA, 22 nt, synthetic construct
  misc_feature 1..22: note = HBV-targeting guide sequence portion
  source 1..22: mol_type = other RNA
gcggctaggagttccgcagtat

SEQ ID NO: 16437 - RNA, 22 nt, synthetic construct
  misc_feature 1..22: note = HBV-targeting guide sequence portion
  source 1..22: mol_type = other RNA
gcgggacgtcctttgtttacgt

SEQ ID NO: 16438 - RNA, 22 nt, synthetic construct
  misc_feature 1..22: note = HBV-targeting guide sequence portion
  source 1..22: mol_type = other RNA
gcgggagaggacaacagagttg

SEQ ID NO: 16439 - RNA, 22 nt, synthetic construct
  misc_feature 1..22: note = HBV-targeting guide sequence portion
  source 1..22: mol_type = other RNA
gcgggattcagcgccgacggga

SEQ ID NO: 16440 - RNA, 22 nt, synthetic construct
  misc_feature 1..22: note = HBV-targeting guide sequence portion
  source 1..22: mol_type = other RNA
gcgggcctacaaactgttcaca

SEQ ID NO: 16441 - RNA, 22 nt, synthetic construct
  misc_feature 1..22: note = HBV-targeting guide sequence portion
  source 1..22: mol_type = other RNA
gcggggtaggctgccgtcctga

SEQ ID NO: 16442 - RNA, 22 nt, synthetic construct
  misc_feature 1..22: note = HBV-targeting guide sequence portion
  source 1..22: mol_type = other RNA
gcggggttttccttgttgacaa

SEQ ID NO: 16443 - RNA, 22 nt, synthetic construct
  misc_feature 1..22: note = HBV-targeting guide sequence portion
  source 1..22: mol_type = other RNA
gcgggtgttttatataagagag

SEQ ID NO: 16444 - RNA, 22 nt, synthetic construct
  misc_feature 1..22: note = HBV-targeting guide sequence portion
  source 1..22: mol_type = other RNA
gcggtataaagggactcaagat

SEQ ID NO: 16445 - RNA, 22 nt, synthetic construct
  misc_feature 1..22: note = HBV-targeting guide sequence portion
  source 1..22: mol_type = other RNA
gcggtatctagaagatctcgta

SEQ ID NO: 16446 - RNA, 22 nt, synthetic construct
  misc_feature 1..22: note = HBV-targeting guide sequence portion
  source 1..22: mol_type = other RNA
gcggtattgtgaggattcttgt

SEQ ID NO: 16447 - RNA, 22 nt, synthetic construct
  misc_feature 1..22: note = HBV-targeting guide sequence portion
  source 1..22: mol_type = other RNA
gcggtggggtgaaccctagccc

SEQ ID NO: 16448 - RNA, 22 nt, synthetic construct
  misc_feature 1..22: note = HBV-targeting guide sequence portion
  source 1..22: mol_type = other RNA
gcgtaaagagaggtgcgccccg

SEQ ID NO: 16449 - RNA, 22 nt, synthetic construct
  misc_feature 1..22: note = HBV-targeting guide sequence portion
  source 1..22: mol_type = other RNA
gcgtcgcagaagatctcaatct

SEQ ID NO: 16450 - RNA, 22 nt, synthetic construct
  misc_feature 1..22: note = HBV-targeting guide sequence portion
  source 1..22: mol_type = other RNA
gcgtctggccagggatccttgt

SEQ ID NO: 16451 - RNA, 22 nt, synthetic construct
  misc_feature 1..22: note = HBV-targeting guide sequence portion
  source 1..22: mol_type = other RNA
gcgtggaacctttccggctcct

SEQ ID NO: 16452 - RNA, 22 nt, synthetic construct
  misc_feature 1..22: note = HBV-targeting guide sequence portion
  source 1..22: mol_type = other RNA
gcgttcacggtggtctccatgc

SEQ ID NO: 16453 - RNA, 22 nt, synthetic construct
  misc_feature 1..22: note = HBV-targeting guide sequence portion
  source 1..22: mol_type = other RNA
gcgttttatcatcttcctcttc

SEQ ID NO: 16454 - RNA, 22 nt, synthetic construct
  misc_feature 1..22: note = HBV-targeting guide sequence portion
  source 1..22: mol_type = other RNA
gctacagcatggggcagaatct

SEQ ID NO: 16455 - RNA, 22 nt, synthetic construct
  misc_feature 1..22: note = HBV-targeting guide sequence portion
  source 1..22: mol_type = other RNA
gctacctgggtgggtactaatt

SEQ ID NO: 16456 - RNA, 22 nt, synthetic construct
  misc_feature 1..22: note = HBV-targeting guide sequence portion
  source 1..22: mol_type = other RNA
gctactgtggagttactctcgt

SEQ ID NO: 16457 - RNA, 22 nt, synthetic construct
  misc_feature 1..22: note = HBV-targeting guide sequence portion
  source 1..22: mol_type = other RNA
gctagagtcattagttctcccc

SEQ ID NO: 16458 - RNA, 22 nt, synthetic construct
  misc_feature 1..22: note = HBV-targeting guide sequence portion
  source 1..22: mol_type = other RNA
gctaggagttccgcagtatgga

SEQ ID NO: 16459 - RNA, 22 nt, synthetic construct
  misc_feature 1..22: note = HBV-targeting guide sequence portion
  source 1..22: mol_type = other RNA
gctaggctgtgctgccaactgg

SEQ ID NO: 16460 - RNA, 22 nt, synthetic construct
  misc_feature 1..22: note = HBV-targeting guide sequence portion
  source 1..22: mol_type = other RNA
gctagggttcaccccaccgcac

SEQ ID NO: 16461 - RNA, 22 nt, synthetic construct
  misc_feature 1..22: note = HBV-targeting guide sequence portion
  source 1..22: mol_type = other RNA
gctaggttttatcctaaattca

SEQ ID NO: 16462 - RNA, 22 nt, synthetic construct
  misc_feature 1..22: note = HBV-targeting guide sequence portion
  source 1..22: mol_type = other RNA
gctatgcctcatcttcttgttg

SEQ ID NO: 16463 - RNA, 22 nt, synthetic construct
  misc_feature 1..22: note = HBV-targeting guide sequence portion
  source 1..22: mol_type = other RNA
gctatgtcattgattgttgggg

SEQ ID NO: 16464 - RNA, 22 nt, synthetic construct
  misc_feature 1..22: note = HBV-targeting guide sequence portion
  source 1..22: mol_type = other RNA
gctatgtgttgacactctctta

SEQ ID NO: 16465 - RNA, 22 nt, synthetic construct
  misc_feature 1..22: note = HBV-targeting guide sequence portion
  source 1..22: mol_type = other RNA
gctcaaggaacctctatgtatc

SEQ ID NO: 16466 - RNA, 22 nt, synthetic construct
  misc_feature 1..22: note = HBV-targeting guide sequence portion
  source 1..22: mol_type = other RNA
gctcaggagactccaaggcatc

SEQ ID NO: 16467 - RNA, 22 nt, synthetic construct
  misc_feature 1..22: note = HBV-targeting guide sequence portion
  source 1..22: mol_type = other RNA
gctcagggcataatgcaaacct

SEQ ID NO: 16468 - RNA, 22 nt, synthetic construct
  misc_feature 1..22: note = HBV-targeting guide sequence portion
  source 1..22: mol_type = other RNA
gctcagtttactagtgccattt

SEQ ID NO: 16469 - RNA, 22 nt, synthetic construct
  misc_feature 1..22: note = HBV-targeting guide sequence portion
  source 1..22: mol_type = other RNA
gctccaaattctttatatgggt

SEQ ID NO: 16470 - RNA, 22 nt, synthetic construct
  misc_feature 1..22: note = HBV-targeting guide sequence portion
  source 1..22: mol_type = other RNA
gctccaccccaaaaggcctccg

SEQ ID NO: 16471 - RNA, 22 nt, synthetic construct
  misc_feature 1..22: note = HBV-targeting guide sequence portion
  source 1..22: mol_type = other RNA
gctccagaccggctgcgagcaa

SEQ ID NO: 16472 - RNA, 22 nt, synthetic construct
  misc_feature 1..22: note = HBV-targeting guide sequence portion
  source 1..22: mol_type = other RNA
gctccagctcctaccttgttgg

SEQ ID NO: 16473 - RNA, 22 nt, synthetic construct
  misc_feature 1..22: note = HBV-targeting guide sequence portion
  source 1..22: mol_type = other RNA
gctccagttcaggaacagtaaa

SEQ ID NO: 16474 - RNA, 22 nt, synthetic construct
  misc_feature 1..22: note = HBV-targeting guide sequence portion
  source 1..22: mol_type = other RNA
gctcctaccttgttggcgtctg

SEQ ID NO: 16475 - RNA, 22 nt, synthetic construct
  misc_feature 1..22: note = HBV-targeting guide sequence portion
  source 1..22: mol_type = other RNA
gctcctctgccgatccatactg

SEQ ID NO: 16476 - RNA, 22 nt, synthetic construct
  misc_feature 1..22: note = HBV-targeting guide sequence portion
  source 1..22: mol_type = other RNA
gctcgcagccggtctggagcaa

SEQ ID NO: 16477 - RNA, 22 nt, synthetic construct
  misc_feature 1..22: note = HBV-targeting guide sequence portion
  source 1..22: mol_type = other RNA
gctcgtgttacaggcggggttt

SEQ ID NO: 16478 - RNA, 22 nt, synthetic construct
  misc_feature 1..22: note = HBV-targeting guide sequence portion
  source 1..22: mol_type = other RNA
gctctgaaggctgggtccaact

SEQ ID NO: 16479 - RNA, 22 nt, synthetic construct
  misc_feature 1..22: note = HBV-targeting guide sequence portion
  source 1..22: mol_type = other RNA
gctctgtatcgggatgccttgg

SEQ ID NO: 16480 - RNA, 22 nt, synthetic construct
  misc_feature 1..22: note = HBV-targeting guide sequence portion
  source 1..22: mol_type = other RNA
gctcttgttcccaagaatatgg

SEQ ID NO: 16481 - RNA, 22 nt, synthetic construct
  misc_feature 1..22: note = HBV-targeting guide sequence portion
  source 1..22: mol_type = other RNA
gctgaacatggagaacatcaca

SEQ ID NO: 16482 - RNA, 22 nt, synthetic construct
  misc_feature 1..22: note = HBV-targeting guide sequence portion
  source 1..22: mol_type = other RNA
gctgaatcccgcggacgaccca

SEQ ID NO: 16483 - RNA, 22 nt, synthetic construct
  misc_feature 1..22: note = HBV-targeting guide sequence portion
  source 1..22: mol_type = other RNA
gctgaggcccactcccatagga

SEQ ID NO: 16484 - RNA, 22 nt, synthetic construct
  misc_feature 1..22: note = HBV-targeting guide sequence portion
  source 1..22: mol_type = other RNA
gctgatgcaacccccactggtt

SEQ ID NO: 16485 - RNA, 22 nt, synthetic construct
  misc_feature 1..22: note = HBV-targeting guide sequence portion
  source 1..22: mol_type = other RNA
gctgatggcctatgaccaagcc

SEQ ID NO: 16486 - RNA, 22 nt, synthetic construct
  misc_feature 1..22: note = HBV-targeting guide sequence portion
  source 1..22: mol_type = other RNA
gctgccaactggatcctgcgcg

SEQ ID NO: 16487 - RNA, 22 nt, synthetic construct
  misc_feature 1..22: note = HBV-targeting guide sequence portion
  source 1..22: mol_type = other RNA
gctgccccttttacacaatgtg

SEQ ID NO: 16488 - RNA, 22 nt, synthetic construct
  misc_feature 1..22: note = HBV-targeting guide sequence portion
  source 1..22: mol_type = other RNA
gctgccgtcctgactggcgatt

SEQ ID NO: 16489 - RNA, 22 nt, synthetic construct
  misc_feature 1..22: note = HBV-targeting guide sequence portion
  source 1..22: mol_type = other RNA
gctgcgagcaaaacaagcggct

SEQ ID NO: 16490 - RNA, 22 nt, synthetic construct
  misc_feature 1..22: note = HBV-targeting guide sequence portion
  source 1..22: mol_type = other RNA
gctgcggcggtatctagaagat

SEQ ID NO: 16491 - RNA, 22 nt, synthetic construct
  misc_feature 1..22: note = HBV-targeting guide sequence portion
  source 1..22: mol_type = other RNA
gctgctaggctgtgctgccaac

SEQ ID NO: 16492 - RNA, 22 nt, synthetic construct
  misc_feature 1..22: note = HBV-targeting guide sequence portion
  source 1..22: mol_type = other RNA
gctgctatgcctcatcttcttg

SEQ ID NO: 16493 - RNA, 22 nt, synthetic construct
  misc_feature 1..22: note = HBV-targeting guide sequence portion
  source 1..22: mol_type = other RNA
gctggagcattcgggctagggt

SEQ ID NO: 16494 - RNA, 22 nt, synthetic construct
  misc_feature 1..22: note = HBV-targeting guide sequence portion
  source 1..22: mol_type = other RNA
gctggaggagtgcgaatccaca

SEQ ID NO: 16495 - RNA, 22 nt, synthetic construct
  misc_feature 1..22: note = HBV-targeting guide sequence portion
  source 1..22: mol_type = other RNA
gctggatgtgtctgcggcgttt

SEQ ID NO: 16496 - RNA, 22 nt, synthetic construct
  misc_feature 1..22: note = HBV-targeting guide sequence portion
  source 1..22: mol_type = other RNA
gctggcaaggtttgcattatgc

SEQ ID NO: 16497 - RNA, 22 nt, synthetic construct
  misc_feature 1..22: note = HBV-targeting guide sequence portion
  source 1..22: mol_type = other RNA
gctggggagaactaatgactct

SEQ ID NO: 16498 - RNA, 22 nt, synthetic construct
  misc_feature 1..22: note = HBV-targeting guide sequence portion
  source 1..22: mol_type = other RNA
gctgggtccaactggtggtcgg

SEQ ID NO: 16499 - RNA, 22 nt, synthetic construct
  misc_feature 1..22: note = HBV-targeting guide sequence portion
  source 1..22: mol_type = other RNA
gctggtgcgcagaccaatttat

SEQ ID NO: 16500 - RNA, 22 nt, synthetic construct
  misc_feature 1..22: note = HBV-targeting guide sequence portion
  source 1..22: mol_type = other RNA
gctggtggaaagattctgcccc

SEQ ID NO: 16501 - RNA, 22 nt, synthetic construct
  misc_feature 1..22: note = HBV-targeting guide sequence portion
  source 1..22: mol_type = other RNA
gctggtggctccagttcaggaa

SEQ ID NO: 16502 - RNA, 22 nt, synthetic construct
  misc_feature 1..22: note = HBV-targeting guide sequence portion
  source 1..22: mol_type = other RNA
gctggtggttgatgatcctgga

SEQ ID NO: 16503 - RNA, 22 nt, synthetic construct
  misc_feature 1..22: note = HBV-targeting guide sequence portion
  source 1..22: mol_type = other RNA
gctgtacaaaaccttcggatgg

SEQ ID NO: 16504 - RNA, 22 nt, synthetic construct
  misc_feature 1..22: note = HBV-targeting guide sequence portion
  source 1..22: mol_type = other RNA
gctgtacagacttggcccccaa

SEQ ID NO: 16505 - RNA, 22 nt, synthetic construct
  misc_feature 1..22: note = HBV-targeting guide sequence portion
  source 1..22: mol_type = other RNA
gctgtagctcttgttcccaaga

SEQ ID NO: 16506 - RNA, 22 nt, synthetic construct
  misc_feature 1..22: note = HBV-targeting guide sequence portion
  source 1..22: mol_type = other RNA
gctgtaggcataaattggtctg

SEQ ID NO: 16507 - RNA, 22 nt, synthetic construct
  misc_feature 1..22: note = HBV-targeting guide sequence portion
  source 1..22: mol_type = other RNA
gctgtctccacctctgagaaac

SEQ ID NO: 16508 - RNA, 22 nt, synthetic construct
  misc_feature 1..22: note = HBV-targeting guide sequence portion
  source 1..22: mol_type = other RNA
gctgtgccttgggtggctttag

SEQ ID NO: 16509 - RNA, 22 nt, synthetic construct
  misc_feature 1..22: note = HBV-targeting guide sequence portion
  source 1..22: mol_type = other RNA
gctgtgctgccaactggatcct

SEQ ID NO: 16510 - RNA, 22 nt, synthetic construct
  misc_feature 1..22: note = HBV-targeting guide sequence portion
  source 1..22: mol_type = other RNA
gctgttaccaattttcttttgt

SEQ ID NO: 16511 - RNA, 22 nt, synthetic construct
  misc_feature 1..22: note = HBV-targeting guide sequence portion
  source 1..22: mol_type = other RNA
gcttacagttaatgagaaaaga

SEQ ID NO: 16512 - RNA, 22 nt, synthetic construct
  misc_feature 1..22: note = HBV-targeting guide sequence portion
  source 1..22: mol_type = other RNA
gcttagattgaatacatgcata

SEQ ID NO: 16513 - RNA, 22 nt, synthetic construct
  misc_feature 1..22: note = HBV-targeting guide sequence portion
  source 1..22: mol_type = other RNA
gcttatagaccaccaaatgccc

SEQ ID NO: 16514 - RNA, 22 nt, synthetic construct
  misc_feature 1..22: note = HBV-targeting guide sequence portion
  source 1..22: mol_type = other RNA
gcttcacctctgcacgtcgcat

SEQ ID NO: 16515 - RNA, 22 nt, synthetic construct
  misc_feature 1..22: note = HBV-targeting guide sequence portion
  source 1..22: mol_type = other RNA
gcttgaacagtaggacatgaac

SEQ ID NO: 16516 - RNA, 22 nt, synthetic construct
  misc_feature 1..22: note = HBV-targeting guide sequence portion
  source 1..22: mol_type = other RNA
gcttgatcttctaaattagtac

SEQ ID NO: 16517 - RNA, 22 nt, synthetic construct
  misc_feature 1..22: note = HBV-targeting guide sequence portion
  source 1..22: mol_type = other RNA
gcttgcctgagtgcagtatggt

SEQ ID NO: 16518 - RNA, 22 nt, synthetic construct
  misc_feature 1..22: note = HBV-targeting guide sequence portion
  source 1..22: mol_type = other RNA
gcttggaggcttgaacagtagg

SEQ ID NO: 16519 - RNA, 22 nt, synthetic construct
  misc_feature 1..22: note = HBV-targeting guide sequence portion
  source 1..22: mol_type = other RNA
gcttggggccctgtcgtcctct

SEQ ID NO: 16520 - RNA, 22 nt, synthetic construct
  misc_feature 1..22: note = HBV-targeting guide sequence portion
  source 1..22: mol_type = other RNA
gcttggtcataggccatcagcg

SEQ ID NO: 16521 - RNA, 22 nt, synthetic construct
  misc_feature 1..22: note = HBV-targeting guide sequence portion
  source 1..22: mol_type = other RNA
gcttgttttgctcgcagccggt

SEQ ID NO: 16522 - RNA, 22 nt, synthetic construct
  misc_feature 1..22: note = HBV-targeting guide sequence portion
  source 1..22: mol_type = other RNA
gctttaatgcccttgtatgcat

SEQ ID NO: 16523 - RNA, 22 nt, synthetic construct
  misc_feature 1..22: note = HBV-targeting guide sequence portion
  source 1..22: mol_type = other RNA
gctttagggcatggacattgac

SEQ ID NO: 16524 - RNA, 22 nt, synthetic construct
  misc_feature 1..22: note = HBV-targeting guide sequence portion
  source 1..22: mol_type = other RNA
gctttattcttctactgtacct

SEQ ID NO: 16525 - RNA, 22 nt, synthetic construct
  misc_feature 1..22: note = HBV-targeting guide sequence portion
  source 1..22: mol_type = other RNA
gctttcactttttcgccaactt

SEQ ID NO: 16526 - RNA, 22 nt, synthetic construct
  misc_feature 1..22: note = HBV-targeting guide sequence portion
  source 1..22: mol_type = other RNA
gctttcagttatatggatgatg

SEQ ID NO: 16527 - RNA, 22 nt, synthetic construct
  misc_feature 1..22: note = HBV-targeting guide sequence portion
  source 1..22: mol_type = other RNA
gctttcccccactgtttggctt

SEQ ID NO: 16528 - RNA, 22 nt, synthetic construct
  misc_feature 1..22: note = HBV-targeting guide sequence portion
  source 1..22: mol_type = other RNA
gctttcggaaaattcctatggg

SEQ ID NO: 16529 - RNA, 22 nt, synthetic construct
  misc_feature 1..22: note = HBV-targeting guide sequence portion
  source 1..22: mol_type = other RNA
ggaaaacaccctcttttcctaa

SEQ ID NO: 16530 - RNA, 22 nt, synthetic construct
  misc_feature 1..22: note = HBV-targeting guide sequence portion
  source 1..22: mol_type = other RNA
ggaaaaccccgcctgtaacacg

SEQ ID NO: 16531 - RNA, 22 nt, synthetic construct
  misc_feature 1..22: note = HBV-targeting guide sequence portion
  source 1..22: mol_type = other RNA
ggaaaagagggtgttttccaat

SEQ ID NO: 16532 - RNA, 22 nt, synthetic construct
  misc_feature 1..22: note = HBV-targeting guide sequence portion
  source 1..22: mol_type = other RNA
ggaaaattcctatgggagtggg

SEQ ID NO: 16533 - RNA, 22 nt, synthetic construct
  misc_feature 1..22: note = HBV-targeting guide sequence portion
  source 1..22: mol_type = other RNA
ggaaacataccttgatagtcca

SEQ ID NO: 16534 - RNA, 22 nt, synthetic construct
  misc_feature 1..22: note = HBV-targeting guide sequence portion
  source 1..22: mol_type = other RNA
ggaaactgcacctgtattccca

SEQ ID NO: 16535 - RNA, 22 nt, synthetic construct
  misc_feature 1..22: note = HBV-targeting guide sequence portion
  source 1..22: mol_type = other RNA
ggaaagaagtcagaaggcaaaa

SEQ ID NO: 16536 - RNA, 22 nt, synthetic construct
  misc_feature 1..22: note = HBV-targeting guide sequence portion
  source 1..22: mol_type = other RNA
ggaaagaatcccagaggattgc

SEQ ID NO: 16537 - RNA, 22 nt, synthetic construct
  misc_feature 1..22: note = HBV-targeting guide sequence portion
  source 1..22: mol_type = other RNA
ggaaagattctgccccatgctg

SEQ ID NO: 16538 - RNA, 22 nt, synthetic construct
  misc_feature 1..22: note = HBV-targeting guide sequence portion
  source 1..22: mol_type = other RNA
ggaaagccctacgaaccactga

SEQ ID NO: 16539 - RNA, 22 nt, synthetic construct
  misc_feature 1..22: note = HBV-targeting guide sequence portion
  source 1..22: mol_type = other RNA
ggaaaggttccacgcatgcgct

SEQ ID NO: 16540 - RNA, 22 nt, synthetic construct
  misc_feature 1..22: note = HBV-targeting guide sequence portion
  source 1..22: mol_type = other RNA
ggaaagtgtgtcaacgaattgt

SEQ ID NO: 16541 - RNA, 22 nt, synthetic construct
  misc_feature 1..22: note = HBV-targeting guide sequence portion
  source 1..22: mol_type = other RNA
ggaaattttacggggctttatt

SEQ ID NO: 16542 - RNA, 22 nt, synthetic construct
  misc_feature 1..22: note = HBV-targeting guide sequence portion
  source 1..22: mol_type = other RNA
ggaacaagagctacagcatggg

SEQ ID NO: 16543 - RNA, 22 nt, synthetic construct
  misc_feature 1..22: note = HBV-targeting guide sequence portion
  source 1..22: mol_type = other RNA
ggaacagggtttactgttcctg

SEQ ID NO: 16544 - RNA, 22 nt, synthetic construct
  misc_feature 1..22: note = HBV-targeting guide sequence portion
  source 1..22: mol_type = other RNA
ggaacagtaaaccctgttccga

SEQ ID NO: 16545 - RNA, 22 nt, synthetic construct
  misc_feature 1..22: note = HBV-targeting guide sequence portion
  source 1..22: mol_type = other RNA
ggaacctctatgtatccctcct

SEQ ID NO: 16546 - RNA, 22 nt, synthetic construct
  misc_feature 1..22: note = HBV-targeting guide sequence portion
  source 1..22: mol_type = other RNA
ggaacctttccggctcctctgc

SEQ ID NO: 16547 - RNA, 22 nt, synthetic construct
  misc_feature 1..22: note = HBV-targeting guide sequence portion
  source 1..22: mol_type = other RNA
ggaacgatgtatatttgcggga

SEQ ID NO: 16548 - RNA, 22 nt, synthetic construct
  misc_feature 1..22: note = HBV-targeting guide sequence portion
  source 1..22: mol_type = other RNA
ggaacggcaggcagagaagagg

SEQ ID NO: 16549 - RNA, 22 nt, synthetic construct
  misc_feature 1..22: note = HBV-targeting guide sequence portion
  source 1..22: mol_type = other RNA
ggaactaccgtgtgtcttggcc

SEQ ID NO: 16550 - RNA, 22 nt, synthetic construct
  misc_feature 1..22: note = HBV-targeting guide sequence portion
  source 1..22: mol_type = other RNA
ggaactcctagccgcttgtttt

SEQ ID NO: 16551 - RNA, 22 nt, synthetic construct
  misc_feature 1..22: note = HBV-targeting guide sequence portion
  source 1..22: mol_type = other RNA
ggaagagaaacggtcctagagt

SEQ ID NO: 16552 - RNA, 22 nt, synthetic construct
  misc_feature 1..22: note = HBV-targeting guide sequence portion
  source 1..22: mol_type = other RNA
ggaagatgataaaacgccgcag

SEQ ID NO: 16553 - RNA, 22 nt, synthetic construct
  misc_feature 1..22: note = HBV-targeting guide sequence portion
  source 1..22: mol_type = other RNA
ggaaggaaagaagtcagaaggc

SEQ ID NO: 16554 - RNA, 22 nt, synthetic construct
  misc_feature 1..22: note = HBV-targeting guide sequence portion
  source 1..22: mol_type = other RNA
ggaaggcgggtgttttatataa

SEQ ID NO: 16555 - RNA, 22 nt, synthetic construct
  misc_feature 1..22: note = HBV-targeting guide sequence portion
  source 1..22: mol_type = other RNA
ggaagtaatgattaactagatg

SEQ ID NO: 16556 - RNA, 22 nt, synthetic construct
  misc_feature 1..22: note = HBV-targeting guide sequence portion
  source 1..22: mol_type = other RNA
ggaagtgttgataggatagggg

SEQ ID NO: 16557 - RNA, 22 nt, synthetic construct
  misc_feature 1..22: note = HBV-targeting guide sequence portion
  source 1..22: mol_type = other RNA
ggaatacaggtgcagtttccat

SEQ ID NO: 16558 - RNA, 22 nt, synthetic construct
  misc_feature 1..22: note = HBV-targeting guide sequence portion
  source 1..22: mol_type = other RNA
ggaatcctgatgtgatgttctc

SEQ ID NO: 16559 - RNA, 22 nt, synthetic construct
  misc_feature 1..22: note = HBV-targeting guide sequence portion
  source 1..22: mol_type = other RNA
ggaattagaggacagacgggaa

SEQ ID NO: 16560 - RNA, 22 nt, synthetic construct
  misc_feature 1..22: note = HBV-targeting guide sequence portion
  source 1..22: mol_type = other RNA
ggaattttccgaaagcccagga

SEQ ID NO: 16561 - RNA, 22 nt, synthetic construct
  misc_feature 1..22: note = HBV-targeting guide sequence portion
  source 1..22: mol_type = other RNA
ggacaacagagttgtcagtccc

SEQ ID NO: 16562 - RNA, 22 nt, synthetic construct
  misc_feature 1..22: note = HBV-targeting guide sequence portion
  source 1..22: mol_type = other RNA
ggacaagttggaggacaggagg

SEQ ID NO: 16563 - RNA, 22 nt, synthetic construct
  misc_feature 1..22: note = HBV-targeting guide sequence portion
  source 1..22: mol_type = other RNA
ggacagacgggaaacatacctt

SEQ ID NO: 16564 - RNA, 22 nt, synthetic construct
  misc_feature 1..22: note = HBV-targeting guide sequence portion
  source 1..22: mol_type = other RNA
ggacaggaggttggtgagtgat

SEQ ID NO: 16565 - RNA, 22 nt, synthetic construct
  misc_feature 1..22: note = HBV-targeting guide sequence portion
  source 1..22: mol_type = other RNA
ggacatgaacaagagatgatta

SEQ ID NO: 16566 - RNA, 22 nt, synthetic construct
  misc_feature 1..22: note = HBV-targeting guide sequence portion
  source 1..22: mol_type = other RNA
ggacattgacccatataaagaa

SEQ ID NO: 16567 - RNA, 22 nt, synthetic construct
  misc_feature 1..22: note = HBV-targeting guide sequence portion
  source 1..22: mol_type = other RNA
ggacccagccttcagagcaaac

SEQ ID NO: 16568 - RNA, 22 nt, synthetic construct
  misc_feature 1..22: note = HBV-targeting guide sequence portion
  source 1..22: mol_type = other RNA
ggacccctgctcgtgttacagg

SEQ ID NO: 16569 - RNA, 22 nt, synthetic construct
  misc_feature 1..22: note = HBV-targeting guide sequence portion
  source 1..22: mol_type = other RNA
ggaccctgcagaacctgcacga

SEQ ID NO: 16570 - RNA, 22 nt, synthetic construct
  misc_feature 1..22: note = HBV-targeting guide sequence portion
  source 1..22: mol_type = other RNA
ggaccctgcgctgaacatggag

SEQ ID NO: 16571 - RNA, 22 nt, synthetic construct
  misc_feature 1..22: note = HBV-targeting guide sequence portion
  source 1..22: mol_type = other RNA
ggaccgtgtgcacttcgcttca

SEQ ID NO: 16572 - RNA, 22 nt, synthetic construct
  misc_feature 1..22: note = HBV-targeting guide sequence portion
  source 1..22: mol_type = other RNA
ggaccgtttctcttccaaaagt

SEQ ID NO: 16573 - RNA, 22 nt, synthetic construct
  misc_feature 1..22: note = HBV-targeting guide sequence portion
  source 1..22: mol_type = other RNA
ggacctagtagtcagttatgtc

SEQ ID NO: 16574 - RNA, 22 nt, synthetic construct
  misc_feature 1..22: note = HBV-targeting guide sequence portion
  source 1..22: mol_type = other RNA
ggacctgcctcgtcgtctaaca

SEQ ID NO: 16575 - RNA, 22 nt, synthetic construct
  misc_feature 1..22: note = HBV-targeting guide sequence portion
  source 1..22: mol_type = other RNA
ggacgacagggccccaagcggc

SEQ ID NO: 16576 - RNA, 22 nt, synthetic construct
  misc_feature 1..22: note = HBV-targeting guide sequence portion
  source 1..22: mol_type = other RNA
ggacgacccatctcgaggccgc

SEQ ID NO: 16577 - RNA, 22 nt, synthetic construct
  misc_feature 1..22: note = HBV-targeting guide sequence portion
  source 1..22: mol_type = other RNA
ggacggcagcctaccccgctgt

SEQ ID NO: 16578 - RNA, 22 nt, synthetic construct
  misc_feature 1..22: note = HBV-targeting guide sequence portion
  source 1..22: mol_type = other RNA
ggacgtaaacaaaggacgtccc

SEQ ID NO: 16579 - RNA, 22 nt, synthetic construct
  misc_feature 1..22: note = HBV-targeting guide sequence portion
  source 1..22: mol_type = other RNA
ggacgtcccgcgcaggatccag

SEQ ID NO: 16580 - RNA, 22 nt, synthetic construct
  misc_feature 1..22: note = HBV-targeting guide sequence portion
  source 1..22: mol_type = other RNA
ggacgtcctttgtttacgtccc

SEQ ID NO: 16581 - RNA, 22 nt, synthetic construct
  misc_feature 1..22: note = HBV-targeting guide sequence portion
  source 1..22: mol_type = other RNA
ggactatcaaggtatgtttccc

SEQ ID NO: 16582 - RNA, 22 nt, synthetic construct
  misc_feature 1..22: note = HBV-targeting guide sequence portion
  source 1..22: mol_type = other RNA
ggactcaagatgctgtacagac

SEQ ID NO: 16583 - RNA, 22 nt, synthetic construct
  misc_feature 1..22: note = HBV-targeting guide sequence portion
  source 1..22: mol_type = other RNA
ggactcataaggtgggaaattt

SEQ ID NO: 16584 - RNA, 22 nt, synthetic construct
  misc_feature 1..22: note = HBV-targeting guide sequence portion
  source 1..22: mol_type = other RNA
ggactccccgtctgtgccttct

SEQ ID NO: 16585 - RNA, 22 nt, synthetic construct
  misc_feature 1..22: note = HBV-targeting guide sequence portion
  source 1..22: mol_type = other RNA
ggactctctgcaatgtcaacga

SEQ ID NO: 16586 - RNA, 22 nt, synthetic construct
  misc_feature 1..22: note = HBV-targeting guide sequence portion
  source 1..22: mol_type = other RNA
ggactcttggactctctgcaat

SEQ ID NO: 16587 - RNA, 22 nt, synthetic construct
  misc_feature 1..22: note = HBV-targeting guide sequence portion
  source 1..22: mol_type = other RNA
ggactgacaactctgttgtcct

SEQ ID NO: 16588 - RNA, 22 nt, synthetic construct
  misc_feature 1..22: note = HBV-targeting guide sequence portion
  source 1..22: mol_type = other RNA
ggactgcgaattttggccaaga

SEQ ID NO: 16589 - RNA, 22 nt, synthetic construct
  misc_feature 1..22: note = HBV-targeting guide sequence portion
  source 1..22: mol_type = other RNA
ggacttcaatcccaacaaggat

SEQ ID NO: 16590 - RNA, 22 nt, synthetic construct
  misc_feature 1..22: note = HBV-targeting guide sequence portion
  source 1..22: mol_type = other RNA
ggacttctctcaattttctagg

SEQ ID NO: 16591 - RNA, 22 nt, synthetic construct
  misc_feature 1..22: note = HBV-targeting guide sequence portion
  source 1..22: mol_type = other RNA
ggagaacatcacatcaggattc

SEQ ID NO: 16592 - RNA, 22 nt, synthetic construct
  misc_feature 1..22: note = HBV-targeting guide sequence portion
  source 1..22: mol_type = other RNA
ggagaactaatgactctagcta

SEQ ID NO: 16593 - RNA, 22 nt, synthetic construct
  misc_feature 1..22: note = HBV-targeting guide sequence portion
  source 1..22: mol_type = other RNA
ggagacagcggggtaggctgcc

SEQ ID NO: 16594 - RNA, 22 nt, synthetic construct
  misc_feature 1..22: note = HBV-targeting guide sequence portion
  source 1..22: mol_type = other RNA
ggagaccaccgtgaacgcccac

SEQ ID NO: 16595 - RNA, 22 nt, synthetic construct
  misc_feature 1..22: note = HBV-targeting guide sequence portion
  source 1..22: mol_type = other RNA
ggagactccaaggcatcccgat

SEQ ID NO: 16596 - RNA, 22 nt, synthetic construct
  misc_feature 1..22: note = HBV-targeting guide sequence portion
  source 1..22: mol_type = other RNA
ggagacttgtgttgttagacga

SEQ ID NO: 16597 - RNA, 22 nt, synthetic construct
  misc_feature 1..22: note = HBV-targeting guide sequence portion
  source 1..22: mol_type = other RNA
ggagaggacaacagagttgtca

SEQ ID NO: 16598 - RNA, 22 nt, synthetic construct
  misc_feature 1..22: note = HBV-targeting guide sequence portion
  source 1..22: mol_type = other RNA
ggagatacaggcctctcactct

SEQ ID NO: 16599 - RNA, 22 nt, synthetic construct
  misc_feature 1..22: note = HBV-targeting guide sequence portion
  source 1..22: mol_type = other RNA
ggagattagattaatgatcttt

SEQ ID NO: 16600 - RNA, 22 nt, synthetic construct
  misc_feature 1..22: note = HBV-targeting guide sequence portion
  source 1..22: mol_type = other RNA
ggagcaaacattctcgggactg

SEQ ID NO: 16601 - RNA, 22 nt, synthetic construct
  misc_feature 1..22: note = HBV-targeting guide sequence portion
  source 1..22: mol_type = other RNA
ggagcattcgggctagggttca

SEQ ID NO: 16602 - RNA, 22 nt, synthetic construct
  misc_feature 1..22: note = HBV-targeting guide sequence portion
  source 1..22: mol_type = other RNA
ggagccaccagcagggagatac

SEQ ID NO: 16603 - RNA, 22 nt, synthetic construct
  misc_feature 1..22: note = HBV-targeting guide sequence portion
  source 1..22: mol_type = other RNA
ggagccctcaggctcagggcat

SEQ ID NO: 16604 - RNA, 22 nt, synthetic construct
  misc_feature 1..22: note = HBV-targeting guide sequence portion
  source 1..22: mol_type = other RNA
ggagccggaaaggttccacgca

SEQ ID NO: 16605 - RNA, 22 nt, synthetic construct
  misc_feature 1..22: note = HBV-targeting guide sequence portion
  source 1..22: mol_type = other RNA
ggagctactgtggagttactct

SEQ ID NO: 16606 - RNA, 22 nt, synthetic construct
  misc_feature 1..22: note = HBV-targeting guide sequence portion
  source 1..22: mol_type = other RNA
ggagctggagcattcgggctag

SEQ ID NO: 16607 - RNA, 22 nt, synthetic construct
  misc_feature 1..22: note = HBV-targeting guide sequence portion
  source 1..22: mol_type = other RNA
ggaggacaggaggttggtgagt

SEQ ID NO: 16608 - RNA, 22 nt, synthetic construct
  misc_feature 1..22: note = HBV-targeting guide sequence portion
  source 1..22: mol_type = other RNA
ggaggagattagattaatgatc

SEQ ID NO: 16609 - RNA, 22 nt, synthetic construct
  misc_feature 1..22: note = HBV-targeting guide sequence portion
  source 1..22: mol_type = other RNA
ggaggagtgcgaatccacactc

SEQ ID NO: 16610 - RNA, 22 nt, synthetic construct
  misc_feature 1..22: note = HBV-targeting guide sequence portion
  source 1..22: mol_type = other RNA
ggaggagttgggggaggagatt

SEQ ID NO: 16611 - RNA, 22 nt, synthetic construct
  misc_feature 1..22: note = HBV-targeting guide sequence portion
  source 1..22: mol_type = other RNA
ggaggccttttggggtggagcc

SEQ ID NO: 16612 - RNA, 22 nt, synthetic construct
  misc_feature 1..22: note = HBV-targeting guide sequence portion
  source 1..22: mol_type = other RNA
ggaggcggatttgctggcaagg

SEQ ID NO: 16613 - RNA, 22 nt, synthetic construct
  misc_feature 1..22: note = HBV-targeting guide sequence portion
  source 1..22: mol_type = other RNA
ggaggctgtaggcataaattgg

SEQ ID NO: 16614 - RNA, 22 nt, synthetic construct
  misc_feature 1..22: note = HBV-targeting guide sequence portion
  source 1..22: mol_type = other RNA
ggaggcttgaacagtaggacat

SEQ ID NO: 16615 - RNA, 22 nt, synthetic construct
  misc_feature 1..22: note = HBV-targeting guide sequence portion
  source 1..22: mol_type = other RNA
ggagggatacatagaggttcct

SEQ ID NO: 16616 - RNA, 22 nt, synthetic construct
  misc_feature 1..22: note = HBV-targeting guide sequence portion
  source 1..22: mol_type = other RNA
ggaggttggggactgcgaattt

SEQ ID NO: 16617 - RNA, 22 nt, synthetic construct
  misc_feature 1..22: note = HBV-targeting guide sequence portion
  source 1..22: mol_type = other RNA
ggaggttggtgagtgattggag

SEQ ID NO: 16618 - RNA, 22 nt, synthetic construct
  misc_feature 1..22: note = HBV-targeting guide sequence portion
  source 1..22: mol_type = other RNA
ggagtccgcgtaaagagaggtg

SEQ ID NO: 16619 - RNA, 22 nt, synthetic construct
  misc_feature 1..22: note = HBV-targeting guide sequence portion
  source 1..22: mol_type = other RNA
ggagtcgtgcaggttctgcagg

SEQ ID NO: 16620 - RNA, 22 nt, synthetic construct
  misc_feature 1..22: note = HBV-targeting guide sequence portion
  source 1..22: mol_type = other RNA
ggagtctcctgagcattgttca

SEQ ID NO: 16621 - RNA, 22 nt, synthetic construct
  misc_feature 1..22: note = HBV-targeting guide sequence portion
  source 1..22: mol_type = other RNA
ggagtgcgaatccacactccaa

SEQ ID NO: 16622 - RNA, 22 nt, synthetic construct
  misc_feature 1..22: note = HBV-targeting guide sequence portion
  source 1..22: mol_type = other RNA
ggagtgggcctcagcccgtttc

SEQ ID NO: 16623 - RNA, 22 nt, synthetic construct
  misc_feature 1..22: note = HBV-targeting guide sequence portion
  source 1..22: mol_type = other RNA
ggagtgtggattcgcactcctc

SEQ ID NO: 16624 - RNA, 22 nt, synthetic construct
  misc_feature 1..22: note = HBV-targeting guide sequence portion
  source 1..22: mol_type = other RNA
ggagttactctcgtttttgcct

SEQ ID NO: 16625 - RNA, 22 nt, synthetic construct
  misc_feature 1..22: note = HBV-targeting guide sequence portion
  source 1..22: mol_type = other RNA
ggagttccgcagtatggatcgg

SEQ ID NO: 16626 - RNA, 22 nt, synthetic construct
  misc_feature 1..22: note = HBV-targeting guide sequence portion
  source 1..22: mol_type = other RNA
ggagttcttcttctaggggacc

SEQ ID NO: 16627 - RNA, 22 nt, synthetic construct
  misc_feature 1..22: note = HBV-targeting guide sequence portion
  source 1..22: mol_type = other RNA
ggagttgggggaggagattaga

SEQ ID NO: 16628 - RNA, 22 nt, synthetic construct
  misc_feature 1..22: note = HBV-targeting guide sequence portion
  source 1..22: mol_type = other RNA
ggagtttgctctgaaggctggg

SEQ ID NO: 16629 - RNA, 22 nt, synthetic construct
  misc_feature 1..22: note = HBV-targeting guide sequence portion
  source 1..22: mol_type = other RNA
ggagttttctgaaacattcttt

SEQ ID NO: 16630 - RNA, 22 nt, synthetic construct
  misc_feature 1..22: note = HBV-targeting guide sequence portion
  source 1..22: mol_type = other RNA
ggataaaacctagcaggcataa

SEQ ID NO: 16631 - RNA, 22 nt, synthetic construct
  misc_feature 1..22: note = HBV-targeting guide sequence portion
  source 1..22: mol_type = other RNA
ggataaccacattgtgtaaaag

SEQ ID NO: 16632 - RNA, 22 nt, synthetic construct
  misc_feature 1..22: note = HBV-targeting guide sequence portion
  source 1..22: mol_type = other RNA
ggataagggtattaaaccttat

SEQ ID NO: 16633 - RNA, 22 nt, synthetic construct
  misc_feature 1..22: note = HBV-targeting guide sequence portion
  source 1..22: mol_type = other RNA
ggataataaggtttaataccct

SEQ ID NO: 16634 - RNA, 22 nt, synthetic construct
  misc_feature 1..22: note = HBV-targeting guide sequence portion
  source 1..22: mol_type = other RNA
ggatacatagaggttccttgag

SEQ ID NO: 16635 - RNA, 22 nt, synthetic construct
  misc_feature 1..22: note = HBV-targeting guide sequence portion
  source 1..22: mol_type = other RNA
ggatactaacattgagatcccc

SEQ ID NO: 16636 - RNA, 22 nt, synthetic construct
  misc_feature 1..22: note = HBV-targeting guide sequence portion
  source 1..22: mol_type = other RNA
ggataggggcatttggtggtct

SEQ ID NO: 16637 - RNA, 22 nt, synthetic construct
  misc_feature 1..22: note = HBV-targeting guide sequence portion
  source 1..22: mol_type = other RNA
ggatcatcaaccaccagcacgg

SEQ ID NO: 16638 - RNA, 22 nt, synthetic construct
  misc_feature 1..22: note = HBV-targeting guide sequence portion
  source 1..22: mol_type = other RNA
ggatcattgccacaaaatcaca

SEQ ID NO: 16639 - RNA, 22 nt, synthetic construct
  misc_feature 1..22: note = HBV-targeting guide sequence portion
  source 1..22: mol_type = other RNA
ggatccagttggcagcacagcc

SEQ ID NO: 16640 - RNA, 22 nt, synthetic construct
  misc_feature 1..22: note = HBV-targeting guide sequence portion
  source 1..22: mol_type = other RNA
ggatccctggccagacgccaac

SEQ ID NO: 16641 - RNA, 22 nt, synthetic construct
  misc_feature 1..22: note = HBV-targeting guide sequence portion
  source 1..22: mol_type = other RNA
ggatcctgcgcgggacgtcctt

SEQ ID NO: 16642 - RNA, 22 nt, synthetic construct
  misc_feature 1..22: note = HBV-targeting guide sequence portion
  source 1..22: mol_type = other RNA
ggatccttgttgggattgaagt

SEQ ID NO: 16643 - RNA, 22 nt, synthetic construct
  misc_feature 1..22: note = HBV-targeting guide sequence portion
  source 1..22: mol_type = other RNA
ggatcggcagaggagccggaaa

SEQ ID NO: 16644 - RNA, 22 nt, synthetic construct
  misc_feature 1..22: note = HBV-targeting guide sequence portion
  source 1..22: mol_type = other RNA
ggatctcaatgttagtatccct

SEQ ID NO: 16645 - RNA, 22 nt, synthetic construct
  misc_feature 1..22: note = HBV-targeting guide sequence portion
  source 1..22: mol_type = other RNA
ggatcttgcagagtttggtgga

SEQ ID NO: 16646 - RNA, 22 nt, synthetic construct
  misc_feature 1..22: note = HBV-targeting guide sequence portion
  source 1..22: mol_type = other RNA
ggatgaagaggaagatgataaa

SEQ ID NO: 16647 - RNA, 22 nt, synthetic construct
  misc_feature 1..22: note = HBV-targeting guide sequence portion
  source 1..22: mol_type = other RNA
ggatgagtgtttctcagaggtg

SEQ ID NO: 16648 - RNA, 22 nt, synthetic construct
  misc_feature 1..22: note = HBV-targeting guide sequence portion
  source 1..22: mol_type = other RNA
ggatgatgggatgggaatacag

SEQ ID NO: 16649 - RNA, 22 nt, synthetic construct
  misc_feature 1..22: note = HBV-targeting guide sequence portion
  source 1..22: mol_type = other RNA
ggatgatgtggtattgggggcc

SEQ ID NO: 16650 - RNA, 22 nt, synthetic construct
  misc_feature 1..22: note = HBV-targeting guide sequence portion
  source 1..22: mol_type = other RNA
ggatgccttggagtctcctgag

SEQ ID NO: 16651 - RNA, 22 nt, synthetic construct
  misc_feature 1..22: note = HBV-targeting guide sequence portion
  source 1..22: mol_type = other RNA
ggatggaaactgcacctgtatt

SEQ ID NO: 16652 - RNA, 22 nt, synthetic construct
  misc_feature 1..22: note = HBV-targeting guide sequence portion
  source 1..22: mol_type = other RNA
ggatgggaatacaggtgcagtt

SEQ ID NO: 16653 - RNA, 22 nt, synthetic construct
  misc_feature 1..22: note = HBV-targeting guide sequence portion
  source 1..22: mol_type = other RNA
ggatgtgtctgcggcgttttat

SEQ ID NO: 16654 - RNA, 22 nt, synthetic construct
  misc_feature 1..22: note = HBV-targeting guide sequence portion
  source 1..22: mol_type = other RNA
ggattcagcgccgacgggacgt

SEQ ID NO: 16655 - RNA, 22 nt, synthetic construct
  misc_feature 1..22: note = HBV-targeting guide sequence portion
  source 1..22: mol_type = other RNA
ggattcctaggacccctgctcg

SEQ ID NO: 16656 - RNA, 22 nt, synthetic construct
  misc_feature 1..22: note = HBV-targeting guide sequence portion
  source 1..22: mol_type = other RNA
ggattcgcactcctccagctta

SEQ ID NO: 16657 - RNA, 22 nt, synthetic construct
  misc_feature 1..22: note = HBV-targeting guide sequence portion
  source 1..22: mol_type = other RNA
ggattcttgtcaacaaggaaaa

SEQ ID NO: 16658 - RNA, 22 nt, synthetic construct
  misc_feature 1..22: note = HBV-targeting guide sequence portion
  source 1..22: mol_type = other RNA
ggattctttcccgaccaccagt

SEQ ID NO: 16659 - RNA, 22 nt, synthetic construct
  misc_feature 1..22: note = HBV-targeting guide sequence portion
  source 1..22: mol_type = other RNA
ggattgaagtcccaatctggat

SEQ ID NO: 16660 - RNA, 22 nt, synthetic construct
  misc_feature 1..22: note = HBV-targeting guide sequence portion
  source 1..22: mol_type = other RNA
ggattgctggtggaaagattct

SEQ ID NO: 16661 - RNA, 22 nt, synthetic construct
  misc_feature 1..22: note = HBV-targeting guide sequence portion
  source 1..22: mol_type = other RNA
ggattggggaccctgcgctgaa

SEQ ID NO: 16662 - RNA, 22 nt, synthetic construct
  misc_feature 1..22: note = HBV-targeting guide sequence portion
  source 1..22: mol_type = other RNA
ggattgttggagtttgctctga

SEQ ID NO: 16663 - RNA, 22 nt, synthetic construct
  misc_feature 1..22: note = HBV-targeting guide sequence portion
  source 1..22: mol_type = other RNA
ggatttgctggcaaggtttgca

SEQ ID NO: 16664 - RNA, 22 nt, synthetic construct
  misc_feature 1..22: note = HBV-targeting guide sequence portion
  source 1..22: mol_type = other RNA
ggcaaaaacgagagtaactcca

SEQ ID NO: 16665 - RNA, 22 nt, synthetic construct
  misc_feature 1..22: note = HBV-targeting guide sequence portion
  source 1..22: mol_type = other RNA
ggcaacggccaggtctgtgcca

SEQ ID NO: 16666 - RNA, 22 nt, synthetic construct
  misc_feature 1..22: note = HBV-targeting guide sequence portion
  source 1..22: mol_type = other RNA
ggcaacggggtaaaggttcagg

SEQ ID NO: 16667 - RNA, 22 nt, synthetic construct
  misc_feature 1..22: note = HBV-targeting guide sequence portion
  source 1..22: mol_type = other RNA
ggcaagaattggtgggcgttca

SEQ ID NO: 16668 - RNA, 22 nt, synthetic construct
  misc_feature 1..22: note = HBV-targeting guide sequence portion
  source 1..22: mol_type = other RNA
ggcaagcaattctttgctgggg

SEQ ID NO: 16669 - RNA, 22 nt, synthetic construct
  misc_feature 1..22: note = HBV-targeting guide sequence portion
  source 1..22: mol_type = other RNA
ggcaaggtttgcattatgccct

SEQ ID NO: 16670 - RNA, 22 nt, synthetic construct
  misc_feature 1..22: note = HBV-targeting guide sequence portion
  source 1..22: mol_type = other RNA
ggcaagtatttggtgaatttag

SEQ ID NO: 16671 - RNA, 22 nt, synthetic construct
  misc_feature 1..22: note = HBV-targeting guide sequence portion
  source 1..22: mol_type = other RNA
ggcaatgatccccaacaatcaa

SEQ ID NO: 16672 - RNA, 22 nt, synthetic construct
  misc_feature 1..22: note = HBV-targeting guide sequence portion
  source 1..22: mol_type = other RNA
ggcacagacctggccgttgcct

SEQ ID NO: 16673 - RNA, 22 nt, synthetic construct
  misc_feature 1..22: note = HBV-targeting guide sequence portion
  source 1..22: mol_type = other RNA
ggcacagacggggagtccgcgt

SEQ ID NO: 16674 - RNA, 22 nt, synthetic construct
  misc_feature 1..22: note = HBV-targeting guide sequence portion
  source 1..22: mol_type = other RNA
ggcacagcttggaggcttgaac

SEQ ID NO: 16675 - RNA, 22 nt, synthetic construct
  misc_feature 1..22: note = HBV-targeting guide sequence portion
  source 1..22: mol_type = other RNA
ggcactagtaaactgagccaag

SEQ ID NO: 16676 - RNA, 22 nt, synthetic construct
  misc_feature 1..22: note = HBV-targeting guide sequence portion
  source 1..22: mol_type = other RNA
ggcagaatctttccaccagcaa

SEQ ID NO: 16677 - RNA, 22 nt, synthetic construct
  misc_feature 1..22: note = HBV-targeting guide sequence portion
  source 1..22: mol_type = other RNA
ggcagagaagaggacgacaggg

SEQ ID NO: 16678 - RNA, 22 nt, synthetic construct
  misc_feature 1..22: note = HBV-targeting guide sequence portion
  source 1..22: mol_type = other RNA
ggcagaggagccggaaaggttc

SEQ ID NO: 16679 - RNA, 22 nt, synthetic construct
  misc_feature 1..22: note = HBV-targeting guide sequence portion
  source 1..22: mol_type = other RNA
ggcagaggtgaaaaagttgcat

SEQ ID NO: 16680 - RNA, 22 nt, synthetic construct
  misc_feature 1..22: note = HBV-targeting guide sequence portion
  source 1..22: mol_type = other RNA
ggcagatgagaaggcacagacg

SEQ ID NO: 16681 - RNA, 22 nt, synthetic construct
  misc_feature 1..22: note = HBV-targeting guide sequence portion
  source 1..22: mol_type = other RNA
ggcagcaaaacccagaagaccc

SEQ ID NO: 16682 - RNA, 22 nt, synthetic construct
  misc_feature 1..22: note = HBV-targeting guide sequence portion
  source 1..22: mol_type = other RNA
ggcagcacagcctagcagccat

SEQ ID NO: 16683 - RNA, 22 nt, synthetic construct
  misc_feature 1..22: note = HBV-targeting guide sequence portion
  source 1..22: mol_type = other RNA
ggcagcctaccccgctgtctcc

SEQ ID NO: 16684 - RNA, 22 nt, synthetic construct
  misc_feature 1..22: note = HBV-targeting guide sequence portion
  source 1..22: mol_type = other RNA
ggcaggaggcggatttgctggc

SEQ ID NO: 16685 - RNA, 22 nt, synthetic construct
  misc_feature 1..22: note = HBV-targeting guide sequence portion
  source 1..22: mol_type = other RNA
ggcaggcagagaagaggacgac

SEQ ID NO: 16686 - RNA, 22 nt, synthetic construct
  misc_feature 1..22: note = HBV-targeting guide sequence portion
  source 1..22: mol_type = other RNA
ggcaggtcccctagaagaagaa

SEQ ID NO: 16687 - RNA, 22 nt, synthetic construct
  misc_feature 1..22: note = HBV-targeting guide sequence portion
  source 1..22: mol_type = other RNA
ggcagtagtcggaacagggttt

SEQ ID NO: 16688 - RNA, 22 nt, synthetic construct
  misc_feature 1..22: note = HBV-targeting guide sequence portion
  source 1..22: mol_type = other RNA
ggcataaattggtctgcgcacc

SEQ ID NO: 16689 - RNA, 22 nt, synthetic construct
  misc_feature 1..22: note = HBV-targeting guide sequence portion
  source 1..22: mol_type = other RNA
ggcataatcaatttcaaccgtc

SEQ ID NO: 16690 - RNA, 22 nt, synthetic construct
  misc_feature 1..22: note = HBV-targeting guide sequence portion
  source 1..22: mol_type = other RNA
ggcataatgcaaaccttgccag

SEQ ID NO: 16691 - RNA, 22 nt, synthetic construct
  misc_feature 1..22: note = HBV-targeting guide sequence portion
  source 1..22: mol_type = other RNA
ggcatacttcaaagactgtttg

SEQ ID NO: 16692 - RNA, 22 nt, synthetic construct
  misc_feature 1..22: note = HBV-targeting guide sequence portion
  source 1..22: mol_type = other RNA
ggcatagcagcaggatgaagag

SEQ ID NO: 16693 - RNA, 22 nt, synthetic construct
  misc_feature 1..22: note = HBV-targeting guide sequence portion
  source 1..22: mol_type = other RNA
ggcatcccgatacagagctgcg

SEQ ID NO: 16694 - RNA, 22 nt, synthetic construct
  misc_feature 1..22: note = HBV-targeting guide sequence portion
  source 1..22: mol_type = other RNA
ggcatggacattgacccatata

SEQ ID NO: 16695 - RNA, 22 nt, synthetic construct
  misc_feature 1..22: note = HBV-targeting guide sequence portion
  source 1..22: mol_type = other RNA
ggcattaaagcaggataaccac

SEQ ID NO: 16696 - RNA, 22 nt, synthetic construct
  misc_feature 1..22: note = HBV-targeting guide sequence portion
  source 1..22: mol_type = other RNA
ggcatttggtggtctataagct

SEQ ID NO: 16697 - RNA, 22 nt, synthetic construct
  misc_feature 1..22: note = HBV-targeting guide sequence portion
  source 1..22: mol_type = other RNA
ggccaaaattcgcagtccccaa

SEQ ID NO: 16698 - RNA, 22 nt, synthetic construct
  misc_feature 1..22: note = HBV-targeting guide sequence portion
  source 1..22: mol_type = other RNA
ggccaagacacacggtagttcc

SEQ ID NO: 16699 - RNA, 22 nt, synthetic construct
  misc_feature 1..22: note = HBV-targeting guide sequence portion
  source 1..22: mol_type = other RNA
ggccaagtctgtacagcatctt

SEQ ID NO: 16700 - RNA, 22 nt, synthetic construct
  misc_feature 1..22: note = HBV-targeting guide sequence portion
  source 1..22: mol_type = other RNA
ggccagacgccaacaaggtagg

SEQ ID NO: 16701 - RNA, 22 nt, synthetic construct
  misc_feature 1..22: note = HBV-targeting guide sequence portion
  source 1..22: mol_type = other RNA
ggccagggatccttgttgggat

SEQ ID NO: 16702 - RNA, 22 nt, synthetic construct
  misc_feature 1..22: note = HBV-targeting guide sequence portion
  source 1..22: mol_type = other RNA
ggccaggtctgtgccaagtgtt

SEQ ID NO: 16703 - RNA, 22 nt, synthetic construct
  misc_feature 1..22: note = HBV-targeting guide sequence portion
  source 1..22: mol_type = other RNA
ggccatcagcgcatgcgtggaa

SEQ ID NO: 16704 - RNA, 22 nt, synthetic construct
  misc_feature 1..22: note = HBV-targeting guide sequence portion
  source 1..22: mol_type = other RNA
ggcccactcccataggaatttt

SEQ ID NO: 16705 - RNA, 22 nt, synthetic construct
  misc_feature 1..22: note = HBV-targeting guide sequence portion
  source 1..22: mol_type = other RNA
ggcccatatgagtgttgacata

SEQ ID NO: 16706 - RNA, 22 nt, synthetic construct
  misc_feature 1..22: note = HBV-targeting guide sequence portion
  source 1..22: mol_type = other RNA
ggccccaagcggcctcgagatg

SEQ ID NO: 16707 - RNA, 22 nt, synthetic construct
  misc_feature 1..22: note = HBV-targeting guide sequence portion
  source 1..22: mol_type = other RNA
ggcccccaataccacatcatcc

SEQ ID NO: 16708 - RNA, 22 nt, synthetic construct
  misc_feature 1..22: note = HBV-targeting guide sequence portion
  source 1..22: mol_type = other RNA
ggcccgcttacagttaatgaga

SEQ ID NO: 16709 - RNA, 22 nt, synthetic construct
  misc_feature 1..22: note = HBV-targeting guide sequence portion
  source 1..22: mol_type = other RNA
ggccctgtcgtcctcttctctg

SEQ ID NO: 16710 - RNA, 22 nt, synthetic construct
  misc_feature 1..22: note = HBV-targeting guide sequence portion
  source 1..22: mol_type = other RNA
ggccgcttggggccctgtcgtc

SEQ ID NO: 16711 - RNA, 22 nt, synthetic construct
  misc_feature 1..22: note = HBV-targeting guide sequence portion
  source 1..22: mol_type = other RNA
ggccgttgcctggcaacggggt

SEQ ID NO: 16712 - RNA, 22 nt, synthetic construct
  misc_feature 1..22: note = HBV-targeting guide sequence portion
  source 1..22: mol_type = other RNA
ggcctaaagttcagacaactat

SEQ ID NO: 16713 - RNA, 22 nt, synthetic construct
  misc_feature 1..22: note = HBV-targeting guide sequence portion
  source 1..22: mol_type = other RNA
ggcctacaaactgttcacattt

SEQ ID NO: 16714 - RNA, 22 nt, synthetic construct
  misc_feature 1..22: note = HBV-targeting guide sequence portion
  source 1..22: mol_type = other RNA
ggcctatgaccaagccccaacc

SEQ ID NO: 16715 - RNA, 22 nt, synthetic construct
  misc_feature 1..22: note = HBV-targeting guide sequence portion
  source 1..22: mol_type = other RNA
ggcctattgattggaaagtgtg

SEQ ID NO: 16716 - RNA, 22 nt, synthetic construct
  misc_feature 1..22: note = HBV-targeting guide sequence portion
  source 1..22: mol_type = other RNA
ggcctcagcccgtttctcttgg

SEQ ID NO: 16717 - RNA, 22 nt, synthetic construct
  misc_feature 1..22: note = HBV-targeting guide sequence portion
  source 1..22: mol_type = other RNA
ggcctccgtgcggtggggtgaa

SEQ ID NO: 16718 - RNA, 22 nt, synthetic construct
  misc_feature 1..22: note = HBV-targeting guide sequence portion
  source 1..22: mol_type = other RNA
ggcctcgagatgggtcgtccgc

SEQ ID NO: 16719 - RNA, 22 nt, synthetic construct
  misc_feature 1..22: note = HBV-targeting guide sequence portion
  source 1..22: mol_type = other RNA
ggcctctcactctgggatcttg

SEQ ID NO: 16720 - RNA, 22 nt, synthetic construct
  misc_feature 1..22: note = HBV-targeting guide sequence portion
  source 1..22: mol_type = other RNA
ggcctgaggatgagtgtttctc

SEQ ID NO: 16721 - RNA, 22 nt, synthetic construct
  misc_feature 1..22: note = HBV-targeting guide sequence portion
  source 1..22: mol_type = other RNA
ggcctgtatctccctgctggtg

SEQ ID NO: 16722 - RNA, 22 nt, synthetic construct
  misc_feature 1..22: note = HBV-targeting guide sequence portion
  source 1..22: mol_type = other RNA
ggcctgttaaccgggagttttc

SEQ ID NO: 16723 - RNA, 22 nt, synthetic construct
  misc_feature 1..22: note = HBV-targeting guide sequence portion
  source 1..22: mol_type = other RNA
ggccttgtaagttggcgaaaaa

SEQ ID NO: 16724 - RNA, 22 nt, synthetic construct
  misc_feature 1..22: note = HBV-targeting guide sequence portion
  source 1..22: mol_type = other RNA
ggcctttctgtgtaaacaatac

SEQ ID NO: 16725 - RNA, 22 nt, synthetic construct
  misc_feature 1..22: note = HBV-targeting guide sequence portion
  source 1..22: mol_type = other RNA
ggccttttggggtggagccctc

SEQ ID NO: 16726 - RNA, 22 nt, synthetic construct
  misc_feature 1..22: note = HBV-targeting guide sequence portion
  source 1..22: mol_type = other RNA
ggcgaaaaagtgaaagcctgct

SEQ ID NO: 16727 - RNA, 22 nt, synthetic construct
  misc_feature 1..22: note = HBV-targeting guide sequence portion
  source 1..22: mol_type = other RNA
ggcgagggagttcttcttctag

SEQ ID NO: 16728 - RNA, 22 nt, synthetic construct
  misc_feature 1..22: note = HBV-targeting guide sequence portion
  source 1..22: mol_type = other RNA
ggcgattgagatcttcgtctgc

SEQ ID NO: 16729 - RNA, 22 nt, synthetic construct
  misc_feature 1..22: note = HBV-targeting guide sequence portion
  source 1..22: mol_type = other RNA
ggcgattggtagaggcaggagg

SEQ ID NO: 16730 - RNA, 22 nt, synthetic construct
  misc_feature 1..22: note = HBV-targeting guide sequence portion
  source 1..22: mol_type = other RNA
ggcgcacctctctttacgcgga

SEQ ID NO: 16731 - RNA, 22 nt, synthetic construct
  misc_feature 1..22: note = HBV-targeting guide sequence portion
  source 1..22: mol_type = other RNA
ggcgctatgtgttgacactctc

SEQ ID NO: 16732 - RNA, 22 nt, synthetic construct
  misc_feature 1..22: note = HBV-targeting guide sequence portion
  source 1..22: mol_type = other RNA
ggcgctgaatcccgcggacgac

SEQ ID NO: 16733 - RNA, 22 nt, synthetic construct
  misc_feature 1..22: note = HBV-targeting guide sequence portion
  source 1..22: mol_type = other RNA
ggcggatttgctggcaaggttt

SEQ ID NO: 16734 - RNA, 22 nt, synthetic construct
  misc_feature 1..22: note = HBV-targeting guide sequence portion
  source 1..22: mol_type = other RNA
ggcggggttttccttgttgaca

SEQ ID NO: 16735 - RNA, 22 nt, synthetic construct
  misc_feature 1..22: note = HBV-targeting guide sequence portion
  source 1..22: mol_type = other RNA
ggcgggtgttttatataagaga

SEQ ID NO: 16736 - RNA, 22 nt, synthetic construct
  misc_feature 1..22: note = HBV-targeting guide sequence portion
  source 1..22: mol_type = other RNA
ggcggtatctagaagatctcgt

SEQ ID NO: 16737 - RNA, 22 nt, synthetic construct
  misc_feature 1..22: note = HBV-targeting guide sequence portion
  source 1..22: mol_type = other RNA
ggcgtctggccagggatccttg

SEQ ID NO: 16738 - RNA, 22 nt, synthetic construct
  misc_feature 1..22: note = HBV-targeting guide sequence portion
  source 1..22: mol_type = other RNA
ggcgttcacggtggtctccatg

SEQ ID NO: 16739 - RNA, 22 nt, synthetic construct
  misc_feature 1..22: note = HBV-targeting guide sequence portion
  source 1..22: mol_type = other RNA
ggcgttttatcatcttcctctt

SEQ ID NO: 16740 - RNA, 22 nt, synthetic construct
  misc_feature 1..22: note = HBV-targeting guide sequence portion
  source 1..22: mol_type = other RNA
ggctaggagttccgcagtatgg

SEQ ID NO: 16741 - RNA, 22 nt, synthetic construct
  misc_feature 1..22: note = HBV-targeting guide sequence portion
  source 1..22: mol_type = other RNA
ggctagggttcaccccaccgca

SEQ ID NO: 16742 - RNA, 22 nt, synthetic construct
  misc_feature 1..22: note = HBV-targeting guide sequence portion
  source 1..22: mol_type = other RNA
ggctatgtcattgattgttggg

SEQ ID NO: 16743 - RNA, 22 nt, synthetic construct
  misc_feature 1..22: note = HBV-targeting guide sequence portion
  source 1..22: mol_type = other RNA
ggctcagggcataatgcaaacc

SEQ ID NO: 16744 - RNA, 22 nt, synthetic construct
  misc_feature 1..22: note = HBV-targeting guide sequence portion
  source 1..22: mol_type = other RNA
ggctcagtttactagtgccatt

SEQ ID NO: 16745 - RNA, 22 nt, synthetic construct
  misc_feature 1..22: note = HBV-targeting guide sequence portion
  source 1..22: mol_type = other RNA
ggctccaccccaaaaggcctcc

SEQ ID NO: 16746 - RNA, 22 nt, synthetic construct
  misc_feature 1..22: note = HBV-targeting guide sequence portion
  source 1..22: mol_type = other RNA
ggctccagttcaggaacagtaa

SEQ ID NO: 16747 - RNA, 22 nt, synthetic construct
  misc_feature 1..22: note = HBV-targeting guide sequence portion
  source 1..22: mol_type = other RNA
ggctcctctgccgatccatact

SEQ ID NO: 16748 - RNA, 22 nt, synthetic construct
  misc_feature 1..22: note = HBV-targeting guide sequence portion
  source 1..22: mol_type = other RNA
ggctgaggcccactcccatagg

SEQ ID NO: 16749 - RNA, 22 nt, synthetic construct
  misc_feature 1..22: note = HBV-targeting guide sequence portion
  source 1..22: mol_type = other RNA
ggctgccgtcctgactggcgat

SEQ ID NO: 16750 - RNA, 22 nt, synthetic construct
  misc_feature 1..22: note = HBV-targeting guide sequence portion
  source 1..22: mol_type = other RNA
ggctgcgagcaaaacaagcggc

SEQ ID NO: 16751 - RNA, 22 nt, synthetic construct
  misc_feature 1..22: note = HBV-targeting guide sequence portion
  source 1..22: mol_type = other RNA
ggctgctaggctgtgctgccaa

SEQ ID NO: 16752 - RNA, 22 nt, synthetic construct
  misc_feature 1..22: note = HBV-targeting guide sequence portion
  source 1..22: mol_type = other RNA
ggctgggtccaactggtggtcg

SEQ ID NO: 16753 - RNA, 22 nt, synthetic construct
  misc_feature 1..22: note = HBV-targeting guide sequence portion
  source 1..22: mol_type = other RNA
ggctgtaggcataaattggtct

SEQ ID NO: 16754 - RNA, 22 nt, synthetic construct
  misc_feature 1..22: note = HBV-targeting guide sequence portion
  source 1..22: mol_type = other RNA
ggctgtgctgccaactggatcc

SEQ ID NO: 16755 - RNA, 22 nt, synthetic construct
  misc_feature 1..22: note = HBV-targeting guide sequence portion
  source 1..22: mol_type = other RNA
ggcttgaacagtaggacatgaa

SEQ ID NO: 16756 - RNA, 22 nt, synthetic construct
  misc_feature 1..22: note = HBV-targeting guide sequence portion
  source 1..22: mol_type = other RNA
ggcttggtcataggccatcagc

SEQ ID NO: 16757 - RNA, 22 nt, synthetic construct
  misc_feature 1..22: note = HBV-targeting guide sequence portion
  source 1..22: mol_type = other RNA
ggctttagggcatggacattga

SEQ ID NO: 16758 - RNA, 22 nt, synthetic construct
  misc_feature 1..22: note = HBV-targeting guide sequence portion
  source 1..22: mol_type = other RNA
ggctttattcttctactgtacc

SEQ ID NO: 16759 - RNA, 22 nt, synthetic construct
  misc_feature 1..22: note = HBV-targeting guide sequence portion
  source 1..22: mol_type = other RNA
ggctttcactttttcgccaact

SEQ ID NO: 16760 - RNA, 22 nt, synthetic construct
  misc_feature 1..22: note = HBV-targeting guide sequence portion
  source 1..22: mol_type = other RNA
ggctttcagttatatggatgat

SEQ ID NO: 16761 - RNA, 22 nt, synthetic construct
  misc_feature 1..22: note = HBV-targeting guide sequence portion
  source 1..22: mol_type = other RNA
ggctttcccccactgtttggct

SEQ ID NO: 16762 - RNA, 22 nt, synthetic construct
  misc_feature 1..22: note = HBV-targeting guide sequence portion
  source 1..22: mol_type = other RNA
ggctttcggaaaattcctatgg

SEQ ID NO: 16763 - RNA, 22 nt, synthetic construct
  misc_feature 1..22: note = HBV-targeting guide sequence portion
  source 1..22: mol_type = other RNA
gggaaacataccttgatagtcc

SEQ ID NO: 16764 - RNA, 22 nt, synthetic construct
  misc_feature 1..22: note = HBV-targeting guide sequence portion
  source 1..22: mol_type = other RNA
gggaaagaatcccagaggattg

SEQ ID NO: 16765 - RNA, 22 nt, synthetic construct
  misc_feature 1..22: note = HBV-targeting guide sequence portion
  source 1..22: mol_type = other RNA
gggaaagccctacgaaccactg

SEQ ID NO: 16766 - RNA, 22 nt, synthetic construct
  misc_feature 1..22: note = HBV-targeting guide sequence portion
  source 1..22: mol_type = other RNA
gggaaattttacggggctttat

SEQ ID NO: 16767 - RNA, 22 nt, synthetic construct
  misc_feature 1..22: note = HBV-targeting guide sequence portion
  source 1..22: mol_type = other RNA
gggaacaagagctacagcatgg

SEQ ID NO: 16768 - RNA, 22 nt, synthetic construct
  misc_feature 1..22: note = HBV-targeting guide sequence portion
  source 1..22: mol_type = other RNA
gggaacgatgtatatttgcggg

SEQ ID NO: 16769 - RNA, 22 nt, synthetic construct
  misc_feature 1..22: note = HBV-targeting guide sequence portion
  source 1..22: mol_type = other RNA
gggaactaccgtgtgtcttggc

SEQ ID NO: 16770 - RNA, 22 nt, synthetic construct
  misc_feature 1..22: note = HBV-targeting guide sequence portion
  source 1..22: mol_type = other RNA
gggaatacaggtgcagtttcca

SEQ ID NO: 16771 - RNA, 22 nt, synthetic construct
  misc_feature 1..22: note = HBV-targeting guide sequence portion
  source 1..22: mol_type = other RNA
gggaccctgcagaacctgcacg

SEQ ID NO: 16772 - RNA, 22 nt, synthetic construct
  misc_feature 1..22: note = HBV-targeting guide sequence portion
  source 1..22: mol_type = other RNA
gggaccctgcgctgaacatgga

SEQ ID NO: 16773 - RNA, 22 nt, synthetic construct
  misc_feature 1..22: note = HBV-targeting guide sequence portion
  source 1..22: mol_type = other RNA
gggacctagtagtcagttatgt

SEQ ID NO: 16774 - RNA, 22 nt, synthetic construct
  misc_feature 1..22: note = HBV-targeting guide sequence portion
  source 1..22: mol_type = other RNA
gggacctgcctcgtcgtctaac

SEQ ID NO: 16775 - RNA, 22 nt, synthetic construct
  misc_feature 1..22: note = HBV-targeting guide sequence portion
  source 1..22: mol_type = other RNA
gggacgtaaacaaaggacgtcc

SEQ ID NO: 16776 - RNA, 22 nt, synthetic construct
  misc_feature 1..22: note = HBV-targeting guide sequence portion
  source 1..22: mol_type = other RNA
gggacgtcctttgtttacgtcc

SEQ ID NO: 16777 - RNA, 22 nt, synthetic construct
  misc_feature 1..22: note = HBV-targeting guide sequence portion
  source 1..22: mol_type = other RNA
gggactcaagatgctgtacaga

SEQ ID NO: 16778 - RNA, 22 nt, synthetic construct
  misc_feature 1..22: note = HBV-targeting guide sequence portion
  source 1..22: mol_type = other RNA
gggactgacaactctgttgtcc

SEQ ID NO: 16779 - RNA, 22 nt, synthetic construct
  misc_feature 1..22: note = HBV-targeting guide sequence portion
  source 1..22: mol_type = other RNA
gggactgcgaattttggccaag

SEQ ID NO: 16780 - RNA, 22 nt, synthetic construct
  misc_feature 1..22: note = HBV-targeting guide sequence portion
  source 1..22: mol_type = other RNA
gggacttcaatcccaacaagga

SEQ ID NO: 16781 - RNA, 22 nt, synthetic construct
  misc_feature 1..22: note = HBV-targeting guide sequence portion
  source 1..22: mol_type = other RNA
gggagaactaatgactctagct

SEQ ID NO: 16782 - RNA, 22 nt, synthetic construct
  misc_feature 1..22: note = HBV-targeting guide sequence portion
  source 1..22: mol_type = other RNA
gggagaggacaacagagttgtc

SEQ ID NO: 16783 - RNA, 22 nt, synthetic construct
  misc_feature 1..22: note = HBV-targeting guide sequence portion
  source 1..22: mol_type = other RNA
gggagatacaggcctctcactc

SEQ ID NO: 16784 - RNA, 22 nt, synthetic construct
  misc_feature 1..22: note = HBV-targeting guide sequence portion
  source 1..22: mol_type = other RNA
gggaggagattagattaatgat

SEQ ID NO: 16785 - RNA, 22 nt, synthetic construct
  misc_feature 1..22: note = HBV-targeting guide sequence portion
  source 1..22: mol_type = other RNA
gggaggagttgggggaggagat

SEQ ID NO: 16786 - RNA, 22 nt, synthetic construct
  misc_feature 1..22: note = HBV-targeting guide sequence portion
  source 1..22: mol_type = other RNA
gggagtccgcgtaaagagaggt

SEQ ID NO: 16787 - RNA, 22 nt, synthetic construct
  misc_feature 1..22: note = HBV-targeting guide sequence portion
  source 1..22: mol_type = other RNA
gggagtgggcctcagcccgttt

SEQ ID NO: 16788 - RNA, 22 nt, synthetic construct
  misc_feature 1..22: note = HBV-targeting guide sequence portion
  source 1..22: mol_type = other RNA
gggagttcttcttctaggggac

SEQ ID NO: 16789 - RNA, 22 nt, synthetic construct
  misc_feature 1..22: note = HBV-targeting guide sequence portion
  source 1..22: mol_type = other RNA
gggagttttctgaaacattctt

SEQ ID NO: 16790 - RNA, 22 nt, synthetic construct
  misc_feature 1..22: note = HBV-targeting guide sequence portion
  source 1..22: mol_type = other RNA
gggatacatagaggttccttga

SEQ ID NO: 16791 - RNA, 22 nt, synthetic construct
  misc_feature 1..22: note = HBV-targeting guide sequence portion
  source 1..22: mol_type = other RNA
gggatactaacattgagatccc

SEQ ID NO: 16792 - RNA, 22 nt, synthetic construct
  misc_feature 1..22: note = HBV-targeting guide sequence portion
  source 1..22: mol_type = other RNA
gggatcattgccacaaaatcac

SEQ ID NO: 16793 - RNA, 22 nt, synthetic construct
  misc_feature 1..22: note = HBV-targeting guide sequence portion
  source 1..22: mol_type = other RNA
gggatccttgttgggattgaag

SEQ ID NO: 16794 - RNA, 22 nt, synthetic construct
  misc_feature 1..22: note = HBV-targeting guide sequence portion
  source 1..22: mol_type = other RNA
gggatctcaatgttagtatccc

SEQ ID NO: 16795 - RNA, 22 nt, synthetic construct
  misc_feature 1..22: note = HBV-targeting guide sequence portion
  source 1..22: mol_type = other RNA
gggatcttgcagagtttggtgg

SEQ ID NO: 16796 - RNA, 22 nt, synthetic construct
  misc_feature 1..22: note = HBV-targeting guide sequence portion
  source 1..22: mol_type = other RNA
gggatgccttggagtctcctga

SEQ ID NO: 16797 - RNA, 22 nt, synthetic construct
  misc_feature 1..22: note = HBV-targeting guide sequence portion
  source 1..22: mol_type = other RNA
gggatgggaatacaggtgcagt

SEQ ID NO: 16798 - RNA, 22 nt, synthetic construct
  misc_feature 1..22: note = HBV-targeting guide sequence portion
  source 1..22: mol_type = other RNA
gggattcagcgccgacgggacg

SEQ ID NO: 16799 - RNA, 22 nt, synthetic construct
  misc_feature 1..22: note = HBV-targeting guide sequence portion
  source 1..22: mol_type = other RNA
gggattctttcccgaccaccag

SEQ ID NO: 16800 - RNA, 22 nt, synthetic construct
  misc_feature 1..22: note = HBV-targeting guide sequence portion
  source 1..22: mol_type = other RNA
gggattgaagtcccaatctgga

SEQ ID NO: 16801 - RNA, 22 nt, synthetic construct
  misc_feature 1..22: note = HBV-targeting guide sequence portion
  source 1..22: mol_type = other RNA
gggcaagaattggtgggcgttc

SEQ ID NO: 16802 - RNA, 22 nt, synthetic construct
  misc_feature 1..22: note = HBV-targeting guide sequence portion
  source 1..22: mol_type = other RNA
gggcaagtatttggtgaattta

SEQ ID NO: 16803 - RNA, 22 nt, synthetic construct
  misc_feature 1..22: note = HBV-targeting guide sequence portion
  source 1..22: mol_type = other RNA
gggcagaatctttccaccagca

SEQ ID NO: 16804 - RNA, 22 nt, synthetic construct
  misc_feature 1..22: note = HBV-targeting guide sequence portion
  source 1..22: mol_type = other RNA
gggcagcaaaacccagaagacc

SEQ ID NO: 16805 - RNA, 22 nt, synthetic construct
  misc_feature 1..22: note = HBV-targeting guide sequence portion
  source 1..22: mol_type = other RNA
gggcataatgcaaaccttgcca

SEQ ID NO: 16806 - RNA, 22 nt, synthetic construct
  misc_feature 1..22: note = HBV-targeting guide sequence portion
  source 1..22: mol_type = other RNA
gggcatggacattgacccatat

SEQ ID NO: 16807 - RNA, 22 nt, synthetic construct
  misc_feature 1..22: note = HBV-targeting guide sequence portion
  source 1..22: mol_type = other RNA
gggcattaaagcaggataacca

SEQ ID NO: 16808 - RNA, 22 nt, synthetic construct
  misc_feature 1..22: note = HBV-targeting guide sequence portion
  source 1..22: mol_type = other RNA
gggcatttggtggtctataagc

SEQ ID NO: 16809 - RNA, 22 nt, synthetic construct
  misc_feature 1..22: note = HBV-targeting guide sequence portion
  source 1..22: mol_type = other RNA
gggccaagtctgtacagcatct

SEQ ID NO: 16810 - RNA, 22 nt, synthetic construct
  misc_feature 1..22: note = HBV-targeting guide sequence portion
  source 1..22: mol_type = other RNA
gggccccaagcggcctcgagat

SEQ ID NO: 16811 - RNA, 22 nt, synthetic construct
  misc_feature 1..22: note = HBV-targeting guide sequence portion
  source 1..22: mol_type = other RNA
gggccctgtcgtcctcttctct

SEQ ID NO: 16812 - RNA, 22 nt, synthetic construct
  misc_feature 1..22: note = HBV-targeting guide sequence portion
  source 1..22: mol_type = other RNA
gggcctaaagttcagacaacta

SEQ ID NO: 16813 - RNA, 22 nt, synthetic construct
  misc_feature 1..22: note = HBV-targeting guide sequence portion
  source 1..22: mol_type = other RNA
gggcctacaaactgttcacatt

SEQ ID NO: 16814 - RNA, 22 nt, synthetic construct
  misc_feature 1..22: note = HBV-targeting guide sequence portion
  source 1..22: mol_type = other RNA
gggcctcagcccgtttctcttg

SEQ ID NO: 16815 - RNA, 22 nt, synthetic construct
  misc_feature 1..22: note = HBV-targeting guide sequence portion
  source 1..22: mol_type = other RNA
gggcgcacctctctttacgcgg

SEQ ID NO: 16816 - RNA, 22 nt, synthetic construct
  misc_feature 1..22: note = HBV-targeting guide sequence portion
  source 1..22: mol_type = other RNA
gggcgttcacggtggtctccat

SEQ ID NO: 16817 - RNA, 22 nt, synthetic construct
  misc_feature 1..22: note = HBV-targeting guide sequence portion
  source 1..22: mol_type = other RNA
gggctagggttcaccccaccgc

SEQ ID NO: 16818 - RNA, 22 nt, synthetic construct
  misc_feature 1..22: note = HBV-targeting guide sequence portion
  source 1..22: mol_type = other RNA
gggctatgtcattgattgttgg

SEQ ID NO: 16819 - RNA, 22 nt, synthetic construct
  misc_feature 1..22: note = HBV-targeting guide sequence portion
  source 1..22: mol_type = other RNA
gggctccaccccaaaaggcctc

SEQ ID NO: 16820 - RNA, 22 nt, synthetic construct
  misc_feature 1..22: note = HBV-targeting guide sequence portion
  source 1..22: mol_type = other RNA
gggctgaggcccactcccatag

SEQ ID NO: 16821 - RNA, 22 nt, synthetic construct
  misc_feature 1..22: note = HBV-targeting guide sequence portion
  source 1..22: mol_type = other RNA
gggcttggtcataggccatcag

SEQ ID NO: 16822 - RNA, 22 nt, synthetic construct
  misc_feature 1..22: note = HBV-targeting guide sequence portion
  source 1..22: mol_type = other RNA
gggctttattcttctactgtac

SEQ ID NO: 16823 - RNA, 22 nt, synthetic construct
  misc_feature 1..22: note = HBV-targeting guide sequence portion
  source 1..22: mol_type = other RNA
gggctttcccccactgtttggc

SEQ ID NO: 16824 - RNA, 22 nt, synthetic construct
  misc_feature 1..22: note = HBV-targeting guide sequence portion
  source 1..22: mol_type = other RNA
gggctttcggaaaattcctatg

SEQ ID NO: 16825 - RNA, 22 nt, synthetic construct
  misc_feature 1..22: note = HBV-targeting guide sequence portion
  source 1..22: mol_type = other RNA
ggggaaagccctacgaaccact

SEQ ID NO: 16826 - RNA, 22 nt, synthetic construct
  misc_feature 1..22: note = HBV-targeting guide sequence portion
  source 1..22: mol_type = other RNA
ggggaactaccgtgtgtcttgg

SEQ ID NO: 16827 - RNA, 22 nt, synthetic construct
  misc_feature 1..22: note = HBV-targeting guide sequence portion
  source 1..22: mol_type = other RNA
ggggaccctgcgctgaacatgg

SEQ ID NO: 16828 - RNA, 22 nt, synthetic construct
  misc_feature 1..22: note = HBV-targeting guide sequence portion
  source 1..22: mol_type = other RNA
ggggacctgcctcgtcgtctaa

SEQ ID NO: 16829 - RNA, 22 nt, synthetic construct
  misc_feature 1..22: note = HBV-targeting guide sequence portion
  source 1..22: mol_type = other RNA
ggggactgcgaattttggccaa

SEQ ID NO: 16830 - RNA, 22 nt, synthetic construct
  misc_feature 1..22: note = HBV-targeting guide sequence portion
  source 1..22: mol_type = other RNA
ggggagaactaatgactctagc

SEQ ID NO: 16831 - RNA, 22 nt, synthetic construct
  misc_feature 1..22: note = HBV-targeting guide sequence portion
  source 1..22: mol_type = other RNA
ggggaggagattagattaatga

SEQ ID NO: 16832 - RNA, 22 nt, synthetic construct
  misc_feature 1..22: note = HBV-targeting guide sequence portion
  source 1..22: mol_type = other RNA
ggggagtccgcgtaaagagagg

SEQ ID NO: 16833 - RNA, 22 nt, synthetic construct
  misc_feature 1..22: note = HBV-targeting guide sequence portion
  source 1..22: mol_type = other RNA
ggggatcattgccacaaaatca

SEQ ID NO: 16834 - RNA, 22 nt, synthetic construct
  misc_feature 1..22: note = HBV-targeting guide sequence portion
  source 1..22: mol_type = other RNA
ggggatctcaatgttagtatcc

SEQ ID NO: 16835 - RNA, 22 nt, synthetic construct
  misc_feature 1..22: note = HBV-targeting guide sequence portion
  source 1..22: mol_type = other RNA
ggggcagaatctttccaccagc

SEQ ID NO: 16836 - RNA, 22 nt, synthetic construct
  misc_feature 1..22: note = HBV-targeting guide sequence portion
  source 1..22: mol_type = other RNA
ggggcagcaaaacccagaagac

SEQ ID NO: 16837 - RNA, 22 nt, synthetic construct
  misc_feature 1..22: note = HBV-targeting guide sequence portion
  source 1..22: mol_type = other RNA
ggggcatttggtggtctataag

SEQ ID NO: 16838 - RNA, 22 nt, synthetic construct
  misc_feature 1..22: note = HBV-targeting guide sequence portion
  source 1..22: mol_type = other RNA
ggggccaagtctgtacagcatc

SEQ ID NO: 16839 - RNA, 22 nt, synthetic construct
  misc_feature 1..22: note = HBV-targeting guide sequence portion
  source 1..22: mol_type = other RNA
ggggccctgtcgtcctcttctc

SEQ ID NO: 16840 - RNA, 22 nt, synthetic construct
  misc_feature 1..22: note = HBV-targeting guide sequence portion
  source 1..22: mol_type = other RNA
ggggcgcacctctctttacgcg

SEQ ID NO: 16841 - RNA, 22 nt, synthetic construct
  misc_feature 1..22: note = HBV-targeting guide sequence portion
  source 1..22: mol_type = other RNA
ggggcttggtcataggccatca

SEQ ID NO: 16842 - RNA, 22 nt, synthetic construct
  misc_feature 1..22: note = HBV-targeting guide sequence portion
  source 1..22: mol_type = other RNA
ggggctttattcttctactgta

SEQ ID NO: 16843 - RNA, 22 nt, synthetic construct
  misc_feature 1..22: note = HBV-targeting guide sequence portion
  source 1..22: mol_type = other RNA
gggggaaagccctacgaaccac

SEQ ID NO: 16844 - RNA, 22 nt, synthetic construct
  misc_feature 1..22: note = HBV-targeting guide sequence portion
  source 1..22: mol_type = other RNA
gggggaactaccgtgtgtcttg

SEQ ID NO: 16845 - RNA, 22 nt, synthetic construct
  misc_feature 1..22: note = HBV-targeting guide sequence portion
  source 1..22: mol_type = other RNA
gggggaggagattagattaatg

SEQ ID NO: 16846 - RNA, 22 nt, synthetic construct
  misc_feature 1..22: note = HBV-targeting guide sequence portion
  source 1..22: mol_type = other RNA
gggggccaagtctgtacagcat

SEQ ID NO: 16847 - RNA, 22 nt, synthetic construct
  misc_feature 1..22: note = HBV-targeting guide sequence portion
  source 1..22: mol_type = other RNA
gggggttgcatcagcaaacact

SEQ ID NO: 16848 - RNA, 22 nt, synthetic construct
  misc_feature 1..22: note = HBV-targeting guide sequence portion
  source 1..22: mol_type = other RNA
ggggtaaaggttcaggtattgt

SEQ ID NO: 16849 - RNA, 22 nt, synthetic construct
  misc_feature 1..22: note = HBV-targeting guide sequence portion
  source 1..22: mol_type = other RNA
ggggtaggctgccgtcctgact

SEQ ID NO: 16850 - RNA, 22 nt, synthetic construct
  misc_feature 1..22: note = HBV-targeting guide sequence portion
  source 1..22: mol_type = other RNA
ggggtcctaggaatcctgatgt

SEQ ID NO: 16851 - RNA, 22 nt, synthetic construct
  misc_feature 1..22: note = HBV-targeting guide sequence portion
  source 1..22: mol_type = other RNA
ggggtgaaccctagcccgaatg

SEQ ID NO: 16852 - RNA, 22 nt, synthetic construct
  misc_feature 1..22: note = HBV-targeting guide sequence portion
  source 1..22: mol_type = other RNA
ggggtggagccctcaggctcag

SEQ ID NO: 16853 - RNA, 22 nt, synthetic construct
  misc_feature 1..22: note = HBV-targeting guide sequence portion
  source 1..22: mol_type = other RNA
ggggttattctcttaatttcat

SEQ ID NO: 16854 - RNA, 22 nt, synthetic construct
  misc_feature 1..22: note = HBV-targeting guide sequence portion
  source 1..22: mol_type = other RNA
ggggttgcatcagcaaacactt

SEQ ID NO: 16855 - RNA, 22 nt, synthetic construct
  misc_feature 1..22: note = HBV-targeting guide sequence portion
  source 1..22: mol_type = other RNA
ggggttttccttgttgacaaga

SEQ ID NO: 16856 - RNA, 22 nt, synthetic construct
  misc_feature 1..22: note = HBV-targeting guide sequence portion
  source 1..22: mol_type = other RNA
gggtaaaggttcaggtattgtt

SEQ ID NO: 16857 - RNA, 22 nt, synthetic construct
  misc_feature 1..22: note = HBV-targeting guide sequence portion
  source 1..22: mol_type = other RNA
gggtactaatttagaagatcaa

SEQ ID NO: 16858 - RNA, 22 nt, synthetic construct
  misc_feature 1..22: note = HBV-targeting guide sequence portion
  source 1..22: mol_type = other RNA
gggtaggctgccgtcctgactg

SEQ ID NO: 16859 - RNA, 22 nt, synthetic construct
  misc_feature 1..22: note = HBV-targeting guide sequence portion
  source 1..22: mol_type = other RNA
gggtattaaaccttattatcca

SEQ ID NO: 16860 - RNA, 22 nt, synthetic construct
  misc_feature 1..22: note = HBV-targeting guide sequence portion
  source 1..22: mol_type = other RNA
gggtcaatgtccatgccctaaa

SEQ ID NO: 16861 - RNA, 22 nt, synthetic construct
  misc_feature 1..22: note = HBV-targeting guide sequence portion
  source 1..22: mol_type = other RNA
gggtcaccatattcttgggaac

SEQ ID NO: 16862 - RNA, 22 nt, synthetic construct
  misc_feature 1..22: note = HBV-targeting guide sequence portion
  source 1..22: mol_type = other RNA
gggtccaactggtggtcgggaa

SEQ ID NO: 16863 - RNA, 22 nt, synthetic construct
  misc_feature 1..22: note = HBV-targeting guide sequence portion
  source 1..22: mol_type = other RNA
gggtccccaatcctcgagaaga

SEQ ID NO: 16864 - RNA, 22 nt, synthetic construct
  misc_feature 1..22: note = HBV-targeting guide sequence portion
  source 1..22: mol_type = other RNA
gggtcccgtgctggtggttgat

SEQ ID NO: 16865 - RNA, 22 nt, synthetic construct
  misc_feature 1..22: note = HBV-targeting guide sequence portion
  source 1..22: mol_type = other RNA
gggtcctaggaatcctgatgtg

SEQ ID NO: 16866 - RNA, 22 nt, synthetic construct
  misc_feature 1..22: note = HBV-targeting guide sequence portion
  source 1..22: mol_type = other RNA
gggtcgtccgcgggattcagcg

SEQ ID NO: 16867 - RNA, 22 nt, synthetic construct
  misc_feature 1..22: note = HBV-targeting guide sequence portion
  source 1..22: mol_type = other RNA
gggtcttctgggttttgctgcc

SEQ ID NO: 16868 - RNA, 22 nt, synthetic construct
  misc_feature 1..22: note = HBV-targeting guide sequence portion
  source 1..22: mol_type = other RNA
gggtgaaccctagcccgaatgc

SEQ ID NO: 16869 - RNA, 22 nt, synthetic construct
  misc_feature 1..22: note = HBV-targeting guide sequence portion
  source 1..22: mol_type = other RNA
gggtggagccctcaggctcagg

SEQ ID NO: 16870 - RNA, 22 nt, synthetic construct
  misc_feature 1..22: note = HBV-targeting guide sequence portion
  source 1..22: mol_type = other RNA
gggtggctttagggcatggaca

SEQ ID NO: 16871 - RNA, 22 nt, synthetic construct
  misc_feature 1..22: note = HBV-targeting guide sequence portion
  source 1..22: mol_type = other RNA
gggtgggtactaatttagaaga

SEQ ID NO: 16872 - RNA, 22 nt, synthetic construct
  misc_feature 1..22: note = HBV-targeting guide sequence portion
  source 1..22: mol_type = other RNA
gggtgtacatttaaaccctaac

SEQ ID NO: 16873 - RNA, 22 nt, synthetic construct
  misc_feature 1..22: note = HBV-targeting guide sequence portion
  source 1..22: mol_type = other RNA
gggtgttttatataagagagtg

SEQ ID NO: 16874 - RNA, 22 nt, synthetic construct
  misc_feature 1..22: note = HBV-targeting guide sequence portion
  source 1..22: mol_type = other RNA
gggtgttttccaatgagggtta

SEQ ID NO: 16875 - RNA, 22 nt, synthetic construct
  misc_feature 1..22: note = HBV-targeting guide sequence portion
  source 1..22: mol_type = other RNA
gggttaaagacaggtacagtag

SEQ ID NO: 16876 - RNA, 22 nt, synthetic construct
  misc_feature 1..22: note = HBV-targeting guide sequence portion
  source 1..22: mol_type = other RNA
gggttattctcttaatttcatg

SEQ ID NO: 16877 - RNA, 22 nt, synthetic construct
  misc_feature 1..22: note = HBV-targeting guide sequence portion
  source 1..22: mol_type = other RNA
gggttcaccccaccgcacggag

SEQ ID NO: 16878 - RNA, 22 nt, synthetic construct
  misc_feature 1..22: note = HBV-targeting guide sequence portion
  source 1..22: mol_type = other RNA
gggttgcatcagcaaacacttg

SEQ ID NO: 16879 - RNA, 22 nt, synthetic construct
  misc_feature 1..22: note = HBV-targeting guide sequence portion
  source 1..22: mol_type = other RNA
gggtttaaatgtacacccaaag

SEQ ID NO: 16880 - RNA, 22 nt, synthetic construct
  misc_feature 1..22: note = HBV-targeting guide sequence portion
  source 1..22: mol_type = other RNA
gggtttactgttcctgaactgg

SEQ ID NO: 16881 - RNA, 22 nt, synthetic construct
  misc_feature 1..22: note = HBV-targeting guide sequence portion
  source 1..22: mol_type = other RNA
gggttttccttgttgacaagaa

SEQ ID NO: 16882 - RNA, 22 nt, synthetic construct
  misc_feature 1..22: note = HBV-targeting guide sequence portion
  source 1..22: mol_type = other RNA
gggttttgctgccccttttaca

SEQ ID NO: 16883 - RNA, 22 nt, synthetic construct
  misc_feature 1..22: note = HBV-targeting guide sequence portion
  source 1..22: mol_type = other RNA
ggtaaaggttcaggtattgttt

SEQ ID NO: 16884 - RNA, 22 nt, synthetic construct
  misc_feature 1..22: note = HBV-targeting guide sequence portion
  source 1..22: mol_type = other RNA
ggtaacagcggtataaagggac

SEQ ID NO: 16885 - RNA, 22 nt, synthetic construct
  misc_feature 1..22: note = HBV-targeting guide sequence portion
  source 1..22: mol_type = other RNA
ggtacagtagaagaataaagcc

SEQ ID NO: 16886 - RNA, 22 nt, synthetic construct
  misc_feature 1..22: note = HBV-targeting guide sequence portion
  source 1..22: mol_type = other RNA
ggtactaatttagaagatcaag

SEQ ID NO: 16887 - RNA, 22 nt, synthetic construct
  misc_feature 1..22: note = HBV-targeting guide sequence portion
  source 1..22: mol_type = other RNA
ggtagaggcaggaggcggattt

SEQ ID NO: 16888 - RNA, 22 nt, synthetic construct
  misc_feature 1..22: note = HBV-targeting guide sequence portion
  source 1..22: mol_type = other RNA
ggtagctagagtcattagttct

SEQ ID NO: 16889 - RNA, 22 nt, synthetic construct
  misc_feature 1..22: note = HBV-targeting guide sequence portion
  source 1..22: mol_type = other RNA
ggtaggagctggagcattcggg

SEQ ID NO: 16890 - RNA, 22 nt, synthetic construct
  misc_feature 1..22: note = HBV-targeting guide sequence portion
  source 1..22: mol_type = other RNA
ggtaggctgccgtcctgactgg

SEQ ID NO: 16891 - RNA, 22 nt, synthetic construct
  misc_feature 1..22: note = HBV-targeting guide sequence portion
  source 1..22: mol_type = other RNA
ggtagttccccctagaaaattg

SEQ ID NO: 16892 - RNA, 22 nt, synthetic construct
  misc_feature 1..22: note = HBV-targeting guide sequence portion
  source 1..22: mol_type = other RNA
ggtataaagggactcaagatgc

SEQ ID NO: 16893 - RNA, 22 nt, synthetic construct
  misc_feature 1..22: note = HBV-targeting guide sequence portion
  source 1..22: mol_type = other RNA
ggtatctagaagatctcgtacg

SEQ ID NO: 16894 - RNA, 22 nt, synthetic construct
  misc_feature 1..22: note = HBV-targeting guide sequence portion
  source 1..22: mol_type = other RNA
ggtatgtttcccgtctgtcctc

SEQ ID NO: 16895 - RNA, 22 nt, synthetic construct
  misc_feature 1..22: note = HBV-targeting guide sequence portion
  source 1..22: mol_type = other RNA
ggtattaaaccttattatccag

SEQ ID NO: 16896 - RNA, 22 nt, synthetic construct
  misc_feature 1..22: note = HBV-targeting guide sequence portion
  source 1..22: mol_type = other RNA
ggtattgggggccaagtctgta

SEQ ID NO: 16897 - RNA, 22 nt, synthetic construct
  misc_feature 1..22: note = HBV-targeting guide sequence portion
  source 1..22: mol_type = other RNA
ggtattgtgaggattcttgtca

SEQ ID NO: 16898 - RNA, 22 nt, synthetic construct
  misc_feature 1..22: note = HBV-targeting guide sequence portion
  source 1..22: mol_type = other RNA
ggtattgtttacacagaaaggc

SEQ ID NO: 16899 - RNA, 22 nt, synthetic construct
  misc_feature 1..22: note = HBV-targeting guide sequence portion
  source 1..22: mol_type = other RNA
ggtcaatgtccatgccctaaag

SEQ ID NO: 16900 - RNA, 22 nt, synthetic construct
  misc_feature 1..22: note = HBV-targeting guide sequence portion
  source 1..22: mol_type = other RNA
ggtcaccatattcttgggaaca

SEQ ID NO: 16901 - RNA, 22 nt, synthetic construct
  misc_feature 1..22: note = HBV-targeting guide sequence portion
  source 1..22: mol_type = other RNA
ggtcataggccatcagcgcatg

SEQ ID NO: 16902 - RNA, 22 nt, synthetic construct
  misc_feature 1..22: note = HBV-targeting guide sequence portion
  source 1..22: mol_type = other RNA
ggtccaactggtggtcgggaaa

SEQ ID NO: 16903 - RNA, 22 nt, synthetic construct
  misc_feature 1..22: note = HBV-targeting guide sequence portion
  source 1..22: mol_type = other RNA
ggtccccaatcctcgagaagat

SEQ ID NO: 16904 - RNA, 22 nt, synthetic construct
  misc_feature 1..22: note = HBV-targeting guide sequence portion
  source 1..22: mol_type = other RNA
ggtcccctagaagaagaactcc

SEQ ID NO: 16905 - RNA, 22 nt, synthetic construct
  misc_feature 1..22: note = HBV-targeting guide sequence portion
  source 1..22: mol_type = other RNA
ggtcccgtgctggtggttgatg

SEQ ID NO: 16906 - RNA, 22 nt, synthetic construct
  misc_feature 1..22: note = HBV-targeting guide sequence portion
  source 1..22: mol_type = other RNA
ggtccctagatgcttgatcttc

SEQ ID NO: 16907 - RNA, 22 nt, synthetic construct
  misc_feature 1..22: note = HBV-targeting guide sequence portion
  source 1..22: mol_type = other RNA
ggtccggcagatgagaaggcac

SEQ ID NO: 16908 - RNA, 22 nt, synthetic construct
  misc_feature 1..22: note = HBV-targeting guide sequence portion
  source 1..22: mol_type = other RNA
ggtcctagagtatttggtgtct

SEQ ID NO: 16909 - RNA, 22 nt, synthetic construct
  misc_feature 1..22: note = HBV-targeting guide sequence portion
  source 1..22: mol_type = other RNA
ggtcctaggaatcctgatgtga

SEQ ID NO: 16910 - RNA, 22 nt, synthetic construct
  misc_feature 1..22: note = HBV-targeting guide sequence portion
  source 1..22: mol_type = other RNA
ggtcggaacggcaggcagagaa

SEQ ID NO: 16911 - RNA, 22 nt, synthetic construct
  misc_feature 1..22: note = HBV-targeting guide sequence portion
  source 1..22: mol_type = other RNA
ggtcgggaaagaatcccagagg

SEQ ID NO: 16912 - RNA, 22 nt, synthetic construct
  misc_feature 1..22: note = HBV-targeting guide sequence portion
  source 1..22: mol_type = other RNA
ggtcggtcggaacggcaggcag

SEQ ID NO: 16913 - RNA, 22 nt, synthetic construct
  misc_feature 1..22: note = HBV-targeting guide sequence portion
  source 1..22: mol_type = other RNA
ggtcggtcgttgacattgcaga

SEQ ID NO: 16914 - RNA, 22 nt, synthetic construct
  misc_feature 1..22: note = HBV-targeting guide sequence portion
  source 1..22: mol_type = other RNA
ggtcgtccgcgggattcagcgc

SEQ ID NO: 16915 - RNA, 22 nt, synthetic construct
  misc_feature 1..22: note = HBV-targeting guide sequence portion
  source 1..22: mol_type = other RNA
ggtcgttgacattgcagagagt

SEQ ID NO: 16916 - RNA, 22 nt, synthetic construct
  misc_feature 1..22: note = HBV-targeting guide sequence portion
  source 1..22: mol_type = other RNA
ggtctataagctggaggagtgc

SEQ ID NO: 16917 - RNA, 22 nt, synthetic construct
  misc_feature 1..22: note = HBV-targeting guide sequence portion
  source 1..22: mol_type = other RNA
ggtctccatgcgacgtgcagag

SEQ ID NO: 16918 - RNA, 22 nt, synthetic construct
  misc_feature 1..22: note = HBV-targeting guide sequence portion
  source 1..22: mol_type = other RNA
ggtctgcgcaccagcaccatgc

SEQ ID NO: 16919 - RNA, 22 nt, synthetic construct
  misc_feature 1..22: note = HBV-targeting guide sequence portion
  source 1..22: mol_type = other RNA
ggtctggagcaaacattctcgg

SEQ ID NO: 16920 - RNA, 22 nt, synthetic construct
  misc_feature 1..22: note = HBV-targeting guide sequence portion
  source 1..22: mol_type = other RNA
ggtctgtgccaagtgtttgctg

SEQ ID NO: 16921 - RNA, 22 nt, synthetic construct
  misc_feature 1..22: note = HBV-targeting guide sequence portion
  source 1..22: mol_type = other RNA
ggtcttacataagaggactctt

SEQ ID NO: 16922 - RNA, 22 nt, synthetic construct
  misc_feature 1..22: note = HBV-targeting guide sequence portion
  source 1..22: mol_type = other RNA
ggtcttctgggttttgctgccc

SEQ ID NO: 16923 - RNA, 22 nt, synthetic construct
  misc_feature 1..22: note = HBV-targeting guide sequence portion
  source 1..22: mol_type = other RNA
ggtgaaaaagttgcatggtgct

SEQ ID NO: 16924 - RNA, 22 nt, synthetic construct
  misc_feature 1..22: note = HBV-targeting guide sequence portion
  source 1..22: mol_type = other RNA
ggtgaacaatgctcaggagact

SEQ ID NO: 16925 - RNA, 22 nt, synthetic construct
  misc_feature 1..22: note = HBV-targeting guide sequence portion
  source 1..22: mol_type = other RNA
ggtgaaccctagcccgaatgct

SEQ ID NO: 16926 - RNA, 22 nt, synthetic construct
  misc_feature 1..22: note = HBV-targeting guide sequence portion
  source 1..22: mol_type = other RNA
ggtgaagcgaagtgcacacggt

SEQ ID NO: 16927 - RNA, 22 nt, synthetic construct
  misc_feature 1..22: note = HBV-targeting guide sequence portion
  source 1..22: mol_type = other RNA
ggtgaatttaggataaaaccta

SEQ ID NO: 16928 - RNA, 22 nt, synthetic construct
  misc_feature 1..22: note = HBV-targeting guide sequence portion
  source 1..22: mol_type = other RNA
ggtgacccacagaatgaggcgc

SEQ ID NO: 16929 - RNA, 22 nt, synthetic construct
  misc_feature 1..22: note = HBV-targeting guide sequence portion
  source 1..22: mol_type = other RNA
ggtgaggtgaacaatgctcagg

SEQ ID NO: 16930 - RNA, 22 nt, synthetic construct
  misc_feature 1..22: note = HBV-targeting guide sequence portion
  source 1..22: mol_type = other RNA
ggtgagtgattggaggttgggg

SEQ ID NO: 16931 - RNA, 22 nt, synthetic construct
  misc_feature 1..22: note = HBV-targeting guide sequence portion
  source 1..22: mol_type = other RNA
ggtgcagtttccatccgaaggt

SEQ ID NO: 16932 - RNA, 22 nt, synthetic construct
  misc_feature 1..22: note = HBV-targeting guide sequence portion
  source 1..22: mol_type = other RNA
ggtgcgcagaccaatttatgcc

SEQ ID NO: 16933 - RNA, 22 nt, synthetic construct
  misc_feature 1..22: note = HBV-targeting guide sequence portion
  source 1..22: mol_type = other RNA
ggtgcgccccgtggtcggtcgg

SEQ ID NO: 16934 - RNA, 22 nt, synthetic construct
  misc_feature 1..22: note = HBV-targeting guide sequence portion
  source 1..22: mol_type = other RNA
ggtgctggtgcgcagaccaatt

SEQ ID NO: 16935 - RNA, 22 nt, synthetic construct
  misc_feature 1..22: note = HBV-targeting guide sequence portion
  source 1..22: mol_type = other RNA
ggtggaaagattctgccccatg

SEQ ID NO: 16936 - RNA, 22 nt, synthetic construct
  misc_feature 1..22: note = HBV-targeting guide sequence portion
  source 1..22: mol_type = other RNA
ggtggacttctctcaattttct

SEQ ID NO: 16937 - RNA, 22 nt, synthetic construct
  misc_feature 1..22: note = HBV-targeting guide sequence portion
  source 1..22: mol_type = other RNA
ggtggagacagcggggtaggct

SEQ ID NO: 16938 - RNA, 22 nt, synthetic construct
  misc_feature 1..22: note = HBV-targeting guide sequence portion
  source 1..22: mol_type = other RNA
ggtggagccctcaggctcaggg

SEQ ID NO: 16939 - RNA, 22 nt, synthetic construct
  misc_feature 1..22: note = HBV-targeting guide sequence portion
  source 1..22: mol_type = other RNA
ggtggctccagttcaggaacag

SEQ ID NO: 16940 - RNA, 22 nt, synthetic construct
  misc_feature 1..22: note = HBV-targeting guide sequence portion
  source 1..22: mol_type = other RNA
ggtggctttagggcatggacat

SEQ ID NO: 16941 - RNA, 22 nt, synthetic construct
  misc_feature 1..22: note = HBV-targeting guide sequence portion
  source 1..22: mol_type = other RNA
ggtgggaaattttacggggctt

SEQ ID NO: 16942 - RNA, 22 nt, synthetic construct
  misc_feature 1..22: note = HBV-targeting guide sequence portion
  source 1..22: mol_type = other RNA
ggtgggcgttcacggtggtctc

SEQ ID NO: 16943 - RNA, 22 nt, synthetic construct
  misc_feature 1..22: note = HBV-targeting guide sequence portion
  source 1..22: mol_type = other RNA
ggtggggtgaaccctagcccga

SEQ ID NO: 16944 - RNA, 22 nt, synthetic construct
  misc_feature 1..22: note = HBV-targeting guide sequence portion
  source 1..22: mol_type = other RNA
ggtgggtactaatttagaagat

SEQ ID NO: 16945 - RNA, 22 nt, synthetic construct
  misc_feature 1..22: note = HBV-targeting guide sequence portion
  source 1..22: mol_type = other RNA
ggtggtcgggaaagaatcccag

SEQ ID NO: 16946 - RNA, 22 nt, synthetic construct
  misc_feature 1..22: note = HBV-targeting guide sequence portion
  source 1..22: mol_type = other RNA
ggtggtctataagctggaggag

SEQ ID NO: 16947 - RNA, 22 nt, synthetic construct
  misc_feature 1..22: note = HBV-targeting guide sequence portion
  source 1..22: mol_type = other RNA
ggtggtctccatgcgacgtgca

SEQ ID NO: 16948 - RNA, 22 nt, synthetic construct
  misc_feature 1..22: note = HBV-targeting guide sequence portion
  source 1..22: mol_type = other RNA
ggtggttgatgatcctggaatt

SEQ ID NO: 16949 - RNA, 22 nt, synthetic construct
  misc_feature 1..22: note = HBV-targeting guide sequence portion
  source 1..22: mol_type = other RNA
ggtgtacatttaaaccctaaca

SEQ ID NO: 16950 - RNA, 22 nt, synthetic construct
  misc_feature 1..22: note = HBV-targeting guide sequence portion
  source 1..22: mol_type = other RNA
ggtgtagatgtatattaggaaa

SEQ ID NO: 16951 - RNA, 22 nt, synthetic construct
  misc_feature 1..22: note = HBV-targeting guide sequence portion
  source 1..22: mol_type = other RNA
ggtgtcttttggagtgtggatt

SEQ ID NO: 16952 - RNA, 22 nt, synthetic construct
  misc_feature 1..22: note = HBV-targeting guide sequence portion
  source 1..22: mol_type = other RNA
ggtgttttatataagagagtgt

SEQ ID NO: 16953 - RNA, 22 nt, synthetic construct
  misc_feature 1..22: note = HBV-targeting guide sequence portion
  source 1..22: mol_type = other RNA
ggtgttttccaatgagggttaa

SEQ ID NO: 16954 - RNA, 22 nt, synthetic construct
  misc_feature 1..22: note = HBV-targeting guide sequence portion
  source 1..22: mol_type = other RNA
ggttaaagacaggtacagtaga

SEQ ID NO: 16955 - RNA, 22 nt, synthetic construct
  misc_feature 1..22: note = HBV-targeting guide sequence portion
  source 1..22: mol_type = other RNA
ggttaacaggcctattgattgg

SEQ ID NO: 16956 - RNA, 22 nt, synthetic construct
  misc_feature 1..22: note = HBV-targeting guide sequence portion
  source 1..22: mol_type = other RNA
ggttatcctgctttaatgccct

SEQ ID NO: 16957 - RNA, 22 nt, synthetic construct
  misc_feature 1..22: note = HBV-targeting guide sequence portion
  source 1..22: mol_type = other RNA
ggttatcgctggatgtgtctgc

SEQ ID NO: 16958 - RNA, 22 nt, synthetic construct
  misc_feature 1..22: note = HBV-targeting guide sequence portion
  source 1..22: mol_type = other RNA
ggttattctcttaatttcatgg

SEQ ID NO: 16959 - RNA, 22 nt, synthetic construct
  misc_feature 1..22: note = HBV-targeting guide sequence portion
  source 1..22: mol_type = other RNA
ggttcaccccaccgcacggagg

SEQ ID NO: 16960 - RNA, 22 nt, synthetic construct
  misc_feature 1..22: note = HBV-targeting guide sequence portion
  source 1..22: mol_type = other RNA
ggttcaggtattgtttacacag

SEQ ID NO: 16961 - RNA, 22 nt, synthetic construct
  misc_feature 1..22: note = HBV-targeting guide sequence portion
  source 1..22: mol_type = other RNA
ggttccacgcatgcgctgatgg

SEQ ID NO: 16962 - RNA, 22 nt, synthetic construct
  misc_feature 1..22: note = HBV-targeting guide sequence portion
  source 1..22: mol_type = other RNA
ggttccttgagcaggagtcgtg

SEQ ID NO: 16963 - RNA, 22 nt, synthetic construct
  misc_feature 1..22: note = HBV-targeting guide sequence portion
  source 1..22: mol_type = other RNA
ggttcgtagggctttcccccac

SEQ ID NO: 16964 - RNA, 22 nt, synthetic construct
  misc_feature 1..22: note = HBV-targeting guide sequence portion
  source 1..22: mol_type = other RNA
ggttctgcagggtcccgtgctg

SEQ ID NO: 16965 - RNA, 22 nt, synthetic construct
  misc_feature 1..22: note = HBV-targeting guide sequence portion
  source 1..22: mol_type = other RNA
ggttcttctggactatcaaggt

SEQ ID NO: 16966 - RNA, 22 nt, synthetic construct
  misc_feature 1..22: note = HBV-targeting guide sequence portion
  source 1..22: mol_type = other RNA
ggttgaaattgattatgcctgc

SEQ ID NO: 16967 - RNA, 22 nt, synthetic construct
  misc_feature 1..22: note = HBV-targeting guide sequence portion
  source 1..22: mol_type = other RNA
ggttgatgatcctggaattaga

SEQ ID NO: 16968 - RNA, 22 nt, synthetic construct
  misc_feature 1..22: note = HBV-targeting guide sequence portion
  source 1..22: mol_type = other RNA
ggttgcatcagcaaacacttgg

SEQ ID NO: 16969 - RNA, 22 nt, synthetic construct
  misc_feature 1..22: note = HBV-targeting guide sequence portion
  source 1..22: mol_type = other RNA
ggttggggactgcgaattttgg

SEQ ID NO: 16970 - RNA, 22 nt, synthetic construct
  misc_feature 1..22: note = HBV-targeting guide sequence portion
  source 1..22: mol_type = other RNA
ggttggggcttggtcataggcc

SEQ ID NO: 16971 - RNA, 22 nt, synthetic construct
  misc_feature 1..22: note = HBV-targeting guide sequence portion
  source 1..22: mol_type = other RNA
ggttggtgagtgattggaggtt

SEQ ID NO: 16972 - RNA, 22 nt, synthetic construct
  misc_feature 1..22: note = HBV-targeting guide sequence portion
  source 1..22: mol_type = other RNA
ggtttaaatgtacacccaaaga

SEQ ID NO: 16973 - RNA, 22 nt, synthetic construct
  misc_feature 1..22: note = HBV-targeting guide sequence portion
  source 1..22: mol_type = other RNA
ggtttaatacccttatccaagg

SEQ ID NO: 16974 - RNA, 22 nt, synthetic construct
  misc_feature 1..22: note = HBV-targeting guide sequence portion
  source 1..22: mol_type = other RNA
ggtttactgttcctgaactgga

SEQ ID NO: 16975 - RNA, 22 nt, synthetic construct
  misc_feature 1..22: note = HBV-targeting guide sequence portion
  source 1..22: mol_type = other RNA
ggtttcacatttcttgtcttac

SEQ ID NO: 16976 - RNA, 22 nt, synthetic construct
  misc_feature 1..22: note = HBV-targeting guide sequence portion
  source 1..22: mol_type = other RNA
ggtttgcattatgccctgagcc

SEQ ID NO: 16977 - RNA, 22 nt, synthetic construct
  misc_feature 1..22: note = HBV-targeting guide sequence portion
  source 1..22: mol_type = other RNA
ggttttatcctaaattcaccaa

SEQ ID NO: 16978 - RNA, 22 nt, synthetic construct
  misc_feature 1..22: note = HBV-targeting guide sequence portion
  source 1..22: mol_type = other RNA
ggttttccttgttgacaagaat

SEQ ID NO: 16979 - RNA, 22 nt, synthetic construct
  misc_feature 1..22: note = HBV-targeting guide sequence portion
  source 1..22: mol_type = other RNA
ggttttgctgccccttttacac

SEQ ID NO: 16980 - RNA, 22 nt, synthetic construct
  misc_feature 1..22: note = HBV-targeting guide sequence portion
  source 1..22: mol_type = other RNA
ggttttgtacagcaacaggagg

SEQ ID NO: 16981 - RNA, 22 nt, synthetic construct
  misc_feature 1..22: note = HBV-targeting guide sequence portion
  source 1..22: mol_type = other RNA
gtaaaaggggcagcaaaaccca

SEQ ID NO: 16982 - RNA, 22 nt, synthetic construct
  misc_feature 1..22: note = HBV-targeting guide sequence portion
  source 1..22: mol_type = other RNA
gtaaaatttcccaccttatgag

SEQ ID NO: 16983 - RNA, 22 nt, synthetic construct
  misc_feature 1..22: note = HBV-targeting guide sequence portion
  source 1..22: mol_type = other RNA
gtaaacaaaggacgtcccgcgc

SEQ ID NO: 16984 - RNA, 22 nt, synthetic construct
  misc_feature 1..22: note = HBV-targeting guide sequence portion
  source 1..22: mol_type = other RNA
gtaaacaatacctgaaccttta

SEQ ID NO: 16985 - RNA, 22 nt, synthetic construct
  misc_feature 1..22: note = HBV-targeting guide sequence portion
  source 1..22: mol_type = other RNA
gtaaaccctgttccgactactg

SEQ ID NO: 16986 - RNA, 22 nt, synthetic construct
  misc_feature 1..22: note = HBV-targeting guide sequence portion
  source 1..22: mol_type = other RNA
gtaaactgagccaagagaaacg

SEQ ID NO: 16987 - RNA, 22 nt, synthetic construct
  misc_feature 1..22: note = HBV-targeting guide sequence portion
  source 1..22: mol_type = other RNA
gtaaagagaggtgcgccccgtg

SEQ ID NO: 16988 - RNA, 22 nt, synthetic construct
  misc_feature 1..22: note = HBV-targeting guide sequence portion
  source 1..22: mol_type = other RNA
gtaaaggttcaggtattgttta

SEQ ID NO: 16989 - RNA, 22 nt, synthetic construct
  misc_feature 1..22: note = HBV-targeting guide sequence portion
  source 1..22: mol_type = other RNA
gtaaatagtgtctagtttggaa

SEQ ID NO: 16990 - RNA, 22 nt, synthetic construct
  misc_feature 1..22: note = HBV-targeting guide sequence portion
  source 1..22: mol_type = other RNA
gtaacacgagcaggggtcctag

SEQ ID NO: 16991 - RNA, 22 nt, synthetic construct
  misc_feature 1..22: note = HBV-targeting guide sequence portion
  source 1..22: mol_type = other RNA
gtaacagcggtataaagggact

SEQ ID NO: 16992 - RNA, 22 nt, synthetic construct
  misc_feature 1..22: note = HBV-targeting guide sequence portion
  source 1..22: mol_type = other RNA
gtaactccacagtagctccaaa

SEQ ID NO: 16993 - RNA, 22 nt, synthetic construct
  misc_feature 1..22: note = HBV-targeting guide sequence portion
  source 1..22: mol_type = other RNA
gtaagacaagaaatgtgaaacc

SEQ ID NO: 16994 - RNA, 22 nt, synthetic construct
  misc_feature 1..22: note = HBV-targeting guide sequence portion
  source 1..22: mol_type = other RNA
gtaagaccttgggcaagaattg

SEQ ID NO: 16995 - RNA, 22 nt, synthetic construct
  misc_feature 1..22: note = HBV-targeting guide sequence portion
  source 1..22: mol_type = other RNA
gtaagcgggcctacaaactgtt

SEQ ID NO: 16996 - RNA, 22 nt, synthetic construct
  misc_feature 1..22: note = HBV-targeting guide sequence portion
  source 1..22: mol_type = other RNA
gtaagttggcgaaaaagtgaaa

SEQ ID NO: 16997 - RNA, 22 nt, synthetic construct
  misc_feature 1..22: note = HBV-targeting guide sequence portion
  source 1..22: mol_type = other RNA
gtaatgattaactagatgttct

SEQ ID NO: 16998 - RNA, 22 nt, synthetic construct
  misc_feature 1..22: note = HBV-targeting guide sequence portion
  source 1..22: mol_type = other RNA
gtacaaaaccttcggatggaaa

SEQ ID NO: 16999 - RNA, 22 nt, synthetic construct
  misc_feature 1..22: note = HBV-targeting guide sequence portion
  source 1..22: mol_type = other RNA
gtacaaagatcattaatctaat

SEQ ID NO: 17000 - RNA, 22 nt, synthetic construct
  misc_feature 1..22: note = HBV-targeting guide sequence portion
  source 1..22: mol_type = other RNA
gtacacccaaagacaaaagaaa

SEQ ID NO: 17001 - RNA, 22 nt, synthetic construct
  misc_feature 1..22: note = HBV-targeting guide sequence portion
  source 1..22: mol_type = other RNA
gtacagacttggcccccaatac

SEQ ID NO: 17002 - RNA, 22 nt, synthetic construct
  misc_feature 1..22: note = HBV-targeting guide sequence portion
  source 1..22: mol_type = other RNA
gtacagcaacaggagggataca

SEQ ID NO: 17003 - RNA, 22 nt, synthetic construct
  misc_feature 1..22: note = HBV-targeting guide sequence portion
  source 1..22: mol_type = other RNA
gtacagcatcttgagtcccttt

SEQ ID NO: 17004 - RNA, 22 nt, synthetic construct
  misc_feature 1..22: note = HBV-targeting guide sequence portion
  source 1..22: mol_type = other RNA
gtacagtagaagaataaagccc

SEQ ID NO: 17005 - RNA, 22 nt, synthetic construct
  misc_feature 1..22: note = HBV-targeting guide sequence portion
  source 1..22: mol_type = other RNA
gtacatttaaaccctaacaaaa

SEQ ID NO: 17006 - RNA, 22 nt, synthetic construct
  misc_feature 1..22: note = HBV-targeting guide sequence portion
  source 1..22: mol_type = other RNA
gtacccacccaggtagctagag

SEQ ID NO: 17007 - RNA, 22 nt, synthetic construct
  misc_feature 1..22: note = HBV-targeting guide sequence portion
  source 1..22: mol_type = other RNA
gtacctgtctttaaccctcatt

SEQ ID NO: 17008 - RNA, 22 nt, synthetic construct
  misc_feature 1..22: note = HBV-targeting guide sequence portion
  source 1..22: mol_type = other RNA
gtacgagatcttctagataccg

SEQ ID NO: 17009 - RNA, 22 nt, synthetic construct
  misc_feature 1..22: note = HBV-targeting guide sequence portion
  source 1..22: mol_type = other RNA
gtacggaaggaaagaagtcaga

SEQ ID NO: 17010 - RNA, 22 nt, synthetic construct
  misc_feature 1..22: note = HBV-targeting guide sequence portion
  source 1..22: mol_type = other RNA
gtactaatttagaagatcaagc

SEQ ID NO: 17011 - RNA, 22 nt, synthetic construct
  misc_feature 1..22: note = HBV-targeting guide sequence portion
  source 1..22: mol_type = other RNA
gtactaggaggctgtaggcata

SEQ ID NO: 17012 - RNA, 22 nt, synthetic construct
  misc_feature 1..22: note = HBV-targeting guide sequence portion
  source 1..22: mol_type = other RNA
gtagaagaataaagccccgtaa

SEQ ID NO: 17013 - RNA, 22 nt, synthetic construct
  misc_feature 1..22: note = HBV-targeting guide sequence portion
  source 1..22: mol_type = other RNA
gtagaggcaggaggcggatttg

SEQ ID NO: 17014 - RNA, 22 nt, synthetic construct
  misc_feature 1..22: note = HBV-targeting guide sequence portion
  source 1..22: mol_type = other RNA
gtagatgtatattaggaaaaga

SEQ ID NO: 17015 - RNA, 22 nt, synthetic construct
  misc_feature 1..22: note = HBV-targeting guide sequence portion
  source 1..22: mol_type = other RNA
gtagctagagtcattagttctc

SEQ ID NO: 17016 - RNA, 22 nt, synthetic construct
  misc_feature 1..22: note = HBV-targeting guide sequence portion
  source 1..22: mol_type = other RNA
gtagctccaaattctttatatg

SEQ ID NO: 17017 - RNA, 22 nt, synthetic construct
  misc_feature 1..22: note = HBV-targeting guide sequence portion
  source 1..22: mol_type = other RNA
gtagctcttgttcccaagaata

SEQ ID NO: 17018 - RNA, 22 nt, synthetic construct
  misc_feature 1..22: note = HBV-targeting guide sequence portion
  source 1..22: mol_type = other RNA
gtaggacatgaacaagagatga

SEQ ID NO: 17019 - RNA, 22 nt, synthetic construct
  misc_feature 1..22: note = HBV-targeting guide sequence portion
  source 1..22: mol_type = other RNA
gtaggagctggagcattcgggc

SEQ ID NO: 17020 - RNA, 22 nt, synthetic construct
  misc_feature 1..22: note = HBV-targeting guide sequence portion
  source 1..22: mol_type = other RNA
gtaggcataaattggtctgcgc

SEQ ID NO: 17021 - RNA, 22 nt, synthetic construct
  misc_feature 1..22: note = HBV-targeting guide sequence portion
  source 1..22: mol_type = other RNA
gtaggcccgcttacagttaatg

SEQ ID NO: 17022 - RNA, 22 nt, synthetic construct
  misc_feature 1..22: note = HBV-targeting guide sequence portion
  source 1..22: mol_type = other RNA
gtaggctgccgtcctgactggc

SEQ ID NO: 17023 - RNA, 22 nt, synthetic construct
  misc_feature 1..22: note = HBV-targeting guide sequence portion
  source 1..22: mol_type = other RNA
gtagggctttcccccactgttt

SEQ ID NO: 17024 - RNA, 22 nt, synthetic construct
  misc_feature 1..22: note = HBV-targeting guide sequence portion
  source 1..22: mol_type = other RNA
gtagtcagttatgtcaacactc

SEQ ID NO: 17025 - RNA, 22 nt, synthetic construct
  misc_feature 1..22: note = HBV-targeting guide sequence portion
  source 1..22: mol_type = other RNA
gtagtcggaacagggtttactg

SEQ ID NO: 17026 - RNA, 22 nt, synthetic construct
  misc_feature 1..22: note = HBV-targeting guide sequence portion
  source 1..22: mol_type = other RNA
gtagttccccctagaaaattga

SEQ ID NO: 17027 - RNA, 22 nt, synthetic construct
  misc_feature 1..22: note = HBV-targeting guide sequence portion
  source 1..22: mol_type = other RNA
gtataaagggactcaagatgct

SEQ ID NO: 17028 - RNA, 22 nt, synthetic construct
  misc_feature 1..22: note = HBV-targeting guide sequence portion
  source 1..22: mol_type = other RNA
gtatattaggaaaagagggtgt

SEQ ID NO: 17029 - RNA, 22 nt, synthetic construct
  misc_feature 1..22: note = HBV-targeting guide sequence portion
  source 1..22: mol_type = other RNA
gtatatttgcgggagaggacaa

SEQ ID NO: 17030 - RNA, 22 nt, synthetic construct
  misc_feature 1..22: note = HBV-targeting guide sequence portion
  source 1..22: mol_type = other RNA
gtatccctcctgttgctgtaca

SEQ ID NO: 17031 - RNA, 22 nt, synthetic construct
  misc_feature 1..22: note = HBV-targeting guide sequence portion
  source 1..22: mol_type = other RNA
gtatcccttggactcataaggt

SEQ ID NO: 17032 - RNA, 22 nt, synthetic construct
  misc_feature 1..22: note = HBV-targeting guide sequence portion
  source 1..22: mol_type = other RNA
gtatcgggatgccttggagtct

SEQ ID NO: 17033 - RNA, 22 nt, synthetic construct
  misc_feature 1..22: note = HBV-targeting guide sequence portion
  source 1..22: mol_type = other RNA
gtatctagaagatctcgtacgg

SEQ ID NO: 17034 - RNA, 22 nt, synthetic construct
  misc_feature 1..22: note = HBV-targeting guide sequence portion
  source 1..22: mol_type = other RNA
gtatctccctgctggtggctcc

SEQ ID NO: 17035 - RNA, 22 nt, synthetic construct
  misc_feature 1..22: note = HBV-targeting guide sequence portion
  source 1..22: mol_type = other RNA
gtatgatgtgattttgtggcaa

SEQ ID NO: 17036 - RNA, 22 nt, synthetic construct
  misc_feature 1..22: note = HBV-targeting guide sequence portion
  source 1..22: mol_type = other RNA
gtatgcatgtattcaatctaag

SEQ ID NO: 17037 - RNA, 22 nt, synthetic construct
  misc_feature 1..22: note = HBV-targeting guide sequence portion
  source 1..22: mol_type = other RNA
gtatgcctcaaggtcggtcgtt

SEQ ID NO: 17038 - RNA, 22 nt, synthetic construct
  misc_feature 1..22: note = HBV-targeting guide sequence portion
  source 1..22: mol_type = other RNA
gtatggatcggcagaggagccg

SEQ ID NO: 17039 - RNA, 22 nt, synthetic construct
  misc_feature 1..22: note = HBV-targeting guide sequence portion
  source 1..22: mol_type = other RNA
gtatggtgaggtgaacaatgct

SEQ ID NO: 17040 - RNA, 22 nt, synthetic construct
  misc_feature 1..22: note = HBV-targeting guide sequence portion
  source 1..22: mol_type = other RNA
gtatgtttcccgtctgtcctct

SEQ ID NO: 17041 - RNA, 22 nt, synthetic construct
  misc_feature 1..22: note = HBV-targeting guide sequence portion
  source 1..22: mol_type = other RNA
gtattaaaccttattatccaga

SEQ ID NO: 17042 - RNA, 22 nt, synthetic construct
  misc_feature 1..22: note = HBV-targeting guide sequence portion
  source 1..22: mol_type = other RNA
gtattcaatctaagcaggcttt

SEQ ID NO: 17043 - RNA, 22 nt, synthetic construct
  misc_feature 1..22: note = HBV-targeting guide sequence portion
  source 1..22: mol_type = other RNA
gtattcccatcccatcatcctg

SEQ ID NO: 17044 - RNA, 22 nt, synthetic construct
  misc_feature 1..22: note = HBV-targeting guide sequence portion
  source 1..22: mol_type = other RNA
gtattgggggccaagtctgtac

SEQ ID NO: 17045 - RNA, 22 nt, synthetic construct
  misc_feature 1..22: note = HBV-targeting guide sequence portion
  source 1..22: mol_type = other RNA
gtattgtgaggattcttgtcaa

SEQ ID NO: 17046 - RNA, 22 nt, synthetic construct
  misc_feature 1..22: note = HBV-targeting guide sequence portion
  source 1..22: mol_type = other RNA
gtattgtttacacagaaaggcc

SEQ ID NO: 17047 - RNA, 22 nt, synthetic construct
  misc_feature 1..22: note = HBV-targeting guide sequence portion
  source 1..22: mol_type = other RNA
gtatttggtgaatttaggataa

SEQ ID NO: 17048 - RNA, 22 nt, synthetic construct
  misc_feature 1..22: note = HBV-targeting guide sequence portion
  source 1..22: mol_type = other RNA
gtatttggtgtcttttggagtg

SEQ ID NO: 17049 - RNA, 22 nt, synthetic construct
  misc_feature 1..22: note = HBV-targeting guide sequence portion
  source 1..22: mol_type = other RNA
gtcaacaaggaaaaccccgcct

SEQ ID NO: 17050 - RNA, 22 nt, synthetic construct
  misc_feature 1..22: note = HBV-targeting guide sequence portion
  source 1..22: mol_type = other RNA
gtcaacacatagcgcctcattc

SEQ ID NO: 17051 - RNA, 22 nt, synthetic construct
  misc_feature 1..22: note = HBV-targeting guide sequence portion
  source 1..22: mol_type = other RNA
gtcaacactcatatgggcctaa

SEQ ID NO: 17052 - RNA, 22 nt, synthetic construct
  misc_feature 1..22: note = HBV-targeting guide sequence portion
  source 1..22: mol_type = other RNA
gtcaacgaattgtgggtcttct

SEQ ID NO: 17053 - RNA, 22 nt, synthetic construct
  misc_feature 1..22: note = HBV-targeting guide sequence portion
  source 1..22: mol_type = other RNA
gtcaacgaccgaccttgaggca

SEQ ID NO: 17054 - RNA, 22 nt, synthetic construct
  misc_feature 1..22: note = HBV-targeting guide sequence portion
  source 1..22: mol_type = other RNA
gtcaatcttctcgaggattggg

SEQ ID NO: 17055 - RNA, 22 nt, synthetic construct
  misc_feature 1..22: note = HBV-targeting guide sequence portion
  source 1..22: mol_type = other RNA
gtcaatgtccatgccctaaagc

SEQ ID NO: 17056 - RNA, 22 nt, synthetic construct
  misc_feature 1..22: note = HBV-targeting guide sequence portion
  source 1..22: mol_type = other RNA
gtcaccatattcttgggaacaa

SEQ ID NO: 17057 - RNA, 22 nt, synthetic construct
  misc_feature 1..22: note = HBV-targeting guide sequence portion
  source 1..22: mol_type = other RNA
gtcagaaggcaaaaacgagagt

SEQ ID NO: 17058 - RNA, 22 nt, synthetic construct
  misc_feature 1..22: note = HBV-targeting guide sequence portion
  source 1..22: mol_type = other RNA
gtcaggacggcagcctaccccg

SEQ ID NO: 17059 - RNA, 22 nt, synthetic construct
  misc_feature 1..22: note = HBV-targeting guide sequence portion
  source 1..22: mol_type = other RNA
gtcagtcccgagaatgtttgct

SEQ ID NO: 17060 - RNA, 22 nt, synthetic construct
  misc_feature 1..22: note = HBV-targeting guide sequence portion
  source 1..22: mol_type = other RNA
gtcagttatgtcaacactcata

SEQ ID NO: 17061 - RNA, 22 nt, synthetic construct
  misc_feature 1..22: note = HBV-targeting guide sequence portion
  source 1..22: mol_type = other RNA
gtcataggccatcagcgcatgc

SEQ ID NO: 17062 - RNA, 22 nt, synthetic construct
  misc_feature 1..22: note = HBV-targeting guide sequence portion
  source 1..22: mol_type = other RNA
gtcattagttctccccagcaaa

SEQ ID NO: 17063 - RNA, 22 nt, synthetic construct
  misc_feature 1..22: note = HBV-targeting guide sequence portion
  source 1..22: mol_type = other RNA
gtcattgattgttggggatcat

SEQ ID NO: 17064 - RNA, 22 nt, synthetic construct
  misc_feature 1..22: note = HBV-targeting guide sequence portion
  source 1..22: mol_type = other RNA
gtccaactggtggtcgggaaag

SEQ ID NO: 17065 - RNA, 22 nt, synthetic construct
  misc_feature 1..22: note = HBV-targeting guide sequence portion
  source 1..22: mol_type = other RNA
gtccaagagtcctcttatgtaa

SEQ ID NO: 17066 - RNA, 22 nt, synthetic construct
  misc_feature 1..22: note = HBV-targeting guide sequence portion
  source 1..22: mol_type = other RNA
gtccaagggatactaacattga

SEQ ID NO: 17067 - RNA, 22 nt, synthetic construct
  misc_feature 1..22: note = HBV-targeting guide sequence portion
  source 1..22: mol_type = other RNA
gtccaccacgagtctagactct

SEQ ID NO: 17068 - RNA, 22 nt, synthetic construct
  misc_feature 1..22: note = HBV-targeting guide sequence portion
  source 1..22: mol_type = other RNA
gtccagaagaaccaacaagaag

SEQ ID NO: 17069 - RNA, 22 nt, synthetic construct
  misc_feature 1..22: note = HBV-targeting guide sequence portion
  source 1..22: mol_type = other RNA
gtccatgccctaaagccaccca

SEQ ID NO: 17070 - RNA, 22 nt, synthetic construct
  misc_feature 1..22: note = HBV-targeting guide sequence portion
  source 1..22: mol_type = other RNA
gtcccaatctggattgttggag

SEQ ID NO: 17071 - RNA, 22 nt, synthetic construct
  misc_feature 1..22: note = HBV-targeting guide sequence portion
  source 1..22: mol_type = other RNA
gtccccaacctccaatcactca

SEQ ID NO: 17072 - RNA, 22 nt, synthetic construct
  misc_feature 1..22: note = HBV-targeting guide sequence portion
  source 1..22: mol_type = other RNA
gtccccaatcctcgagaagatt

SEQ ID NO: 17073 - RNA, 22 nt, synthetic construct
  misc_feature 1..22: note = HBV-targeting guide sequence portion
  source 1..22: mol_type = other RNA
gtcccctagaagaagaactccc

SEQ ID NO: 17074 - RNA, 22 nt, synthetic construct
  misc_feature 1..22: note = HBV-targeting guide sequence portion
  source 1..22: mol_type = other RNA
gtcccgagaatgtttgctccag

SEQ ID NO: 17075 - RNA, 22 nt, synthetic construct
  misc_feature 1..22: note = HBV-targeting guide sequence portion
  source 1..22: mol_type = other RNA
gtcccgcgcaggatccagttgg

SEQ ID NO: 17076 - RNA, 22 nt, synthetic construct
  misc_feature 1..22: note = HBV-targeting guide sequence portion
  source 1..22: mol_type = other RNA
gtcccgtcggcgctgaatcccg

SEQ ID NO: 17077 - RNA, 22 nt, synthetic construct
  misc_feature 1..22: note = HBV-targeting guide sequence portion
  source 1..22: mol_type = other RNA
gtcccgtgctggtggttgatga

SEQ ID NO: 17078 - RNA, 22 nt, synthetic construct
  misc_feature 1..22: note = HBV-targeting guide sequence portion
  source 1..22: mol_type = other RNA
gtccctagatgcttgatcttct

SEQ ID NO: 17079 - RNA, 22 nt, synthetic construct
  misc_feature 1..22: note = HBV-targeting guide sequence portion
  source 1..22: mol_type = other RNA
gtccctttataccgctgttacc

SEQ ID NO: 17080 - RNA, 22 nt, synthetic construct
  misc_feature 1..22: note = HBV-targeting guide sequence portion
  source 1..22: mol_type = other RNA
gtccgcgggattcagcgccgac

SEQ ID NO: 17081 - RNA, 22 nt, synthetic construct
  misc_feature 1..22: note = HBV-targeting guide sequence portion
  source 1..22: mol_type = other RNA
gtccgcgtaaagagaggtgcgc

SEQ ID NO: 17082 - RNA, 22 nt, synthetic construct
  misc_feature 1..22: note = HBV-targeting guide sequence portion
  source 1..22: mol_type = other RNA
gtccggcagatgagaaggcaca

SEQ ID NO: 17083 - RNA, 22 nt, synthetic construct
  misc_feature 1..22: note = HBV-targeting guide sequence portion
  source 1..22: mol_type = other RNA
gtcctactgttcaagcctccaa

SEQ ID NO: 17084 - RNA, 22 nt, synthetic construct
  misc_feature 1..22: note = HBV-targeting guide sequence portion
  source 1..22: mol_type = other RNA
gtcctagagtatttggtgtctt

SEQ ID NO: 17085 - RNA, 22 nt, synthetic construct
  misc_feature 1..22: note = HBV-targeting guide sequence portion
  source 1..22: mol_type = other RNA
gtcctaggaatcctgatgtgat

SEQ ID NO: 17086 - RNA, 22 nt, synthetic construct
  misc_feature 1..22: note = HBV-targeting guide sequence portion
  source 1..22: mol_type = other RNA
gtcctccaacttgtcctggtta

SEQ ID NO: 17087 - RNA, 22 nt, synthetic construct
  misc_feature 1..22: note = HBV-targeting guide sequence portion
  source 1..22: mol_type = other RNA
gtcctctaattccaggatcatc

SEQ ID NO: 17088 - RNA, 22 nt, synthetic construct
  misc_feature 1..22: note = HBV-targeting guide sequence portion
  source 1..22: mol_type = other RNA
gtcctctcccgcaaatatacat

SEQ ID NO: 17089 - RNA, 22 nt, synthetic construct
  misc_feature 1..22: note = HBV-targeting guide sequence portion
  source 1..22: mol_type = other RNA
gtcctcttatgtaagaccttgg

SEQ ID NO: 17090 - RNA, 22 nt, synthetic construct
  misc_feature 1..22: note = HBV-targeting guide sequence portion
  source 1..22: mol_type = other RNA
gtcctcttctctgcctgccgtt

SEQ ID NO: 17091 - RNA, 22 nt, synthetic construct
  misc_feature 1..22: note = HBV-targeting guide sequence portion
  source 1..22: mol_type = other RNA
gtcctgactggcgattggtaga

SEQ ID NO: 17092 - RNA, 22 nt, synthetic construct
  misc_feature 1..22: note = HBV-targeting guide sequence portion
  source 1..22: mol_type = other RNA
gtcctggttatcgctggatgtg

SEQ ID NO: 17093 - RNA, 22 nt, synthetic construct
  misc_feature 1..22: note = HBV-targeting guide sequence portion
  source 1..22: mol_type = other RNA
gtcctttgtttacgtcccgtcg

SEQ ID NO: 17094 - RNA, 22 nt, synthetic construct
  misc_feature 1..22: note = HBV-targeting guide sequence portion
  source 1..22: mol_type = other RNA
gtcgcagaagatctcaatctcg

SEQ ID NO: 17095 - RNA, 22 nt, synthetic construct
  misc_feature 1..22: note = HBV-targeting guide sequence portion
  source 1..22: mol_type = other RNA
gtcgcatggagaccaccgtgaa

SEQ ID NO: 17096 - RNA, 22 nt, synthetic construct
  misc_feature 1..22: note = HBV-targeting guide sequence portion
  source 1..22: mol_type = other RNA
gtcggaacagggtttactgttc

SEQ ID NO: 17097 - RNA, 22 nt, synthetic construct
  misc_feature 1..22: note = HBV-targeting guide sequence portion
  source 1..22: mol_type = other RNA
gtcggaacggcaggcagagaag

SEQ ID NO: 17098 - RNA, 22 nt, synthetic construct
  misc_feature 1..22: note = HBV-targeting guide sequence portion
  source 1..22: mol_type = other RNA
gtcggcgctgaatcccgcggac

SEQ ID NO: 17099 - RNA, 22 nt, synthetic construct
  misc_feature 1..22: note = HBV-targeting guide sequence portion
  source 1..22: mol_type = other RNA
gtcgggaaagaatcccagagga

SEQ ID NO: 17100 - RNA, 22 nt, synthetic construct
  misc_feature 1..22: note = HBV-targeting guide sequence portion
  source 1..22: mol_type = other RNA
gtcggtcggaacggcaggcaga

SEQ ID NO: 17101 - RNA, 22 nt, synthetic construct
  misc_feature 1..22: note = HBV-targeting guide sequence portion
  source 1..22: mol_type = other RNA
gtcggtcgttgacattgcagag

SEQ ID NO: 17102 - RNA, 22 nt, synthetic construct
  misc_feature 1..22: note = HBV-targeting guide sequence portion
  source 1..22: mol_type = other RNA
gtcgtccgcgggattcagcgcc

SEQ ID NO: 17103 - RNA, 22 nt, synthetic construct
  misc_feature 1..22: note = HBV-targeting guide sequence portion
  source 1..22: mol_type = other RNA
gtcgtcctcttctctgcctgcc

SEQ ID NO: 17104 - RNA, 22 nt, synthetic construct
  misc_feature 1..22: note = HBV-targeting guide sequence portion
  source 1..22: mol_type = other RNA
gtcgtctaacaacacaagtctc

SEQ ID NO: 17105 - RNA, 22 nt, synthetic construct
  misc_feature 1..22: note = HBV-targeting guide sequence portion
  source 1..22: mol_type = other RNA
gtcgtgcaggttctgcagggtc

SEQ ID NO: 17106 - RNA, 22 nt, synthetic construct
  misc_feature 1..22: note = HBV-targeting guide sequence portion
  source 1..22: mol_type = other RNA
gtcgttgacattgcagagagtc

SEQ ID NO: 17107 - RNA, 22 nt, synthetic construct
  misc_feature 1..22: note = HBV-targeting guide sequence portion
  source 1..22: mol_type = other RNA
gtctaacaacacaagtctccgg

SEQ ID NO: 17108 - RNA, 22 nt, synthetic construct
  misc_feature 1..22: note = HBV-targeting guide sequence portion
  source 1..22: mol_type = other RNA
gtctagactcgtggtggacttc

SEQ ID NO: 17109 - RNA, 22 nt, synthetic construct
  misc_feature 1..22: note = HBV-targeting guide sequence portion
  source 1..22: mol_type = other RNA
gtctagactctgcggtattgtg

SEQ ID NO: 17110 - RNA, 22 nt, synthetic construct
  misc_feature 1..22: note = HBV-targeting guide sequence portion
  source 1..22: mol_type = other RNA
gtctagtttggaagtaatgatt

SEQ ID NO: 17111 - RNA, 22 nt, synthetic construct
  misc_feature 1..22: note = HBV-targeting guide sequence portion
  source 1..22: mol_type = other RNA
gtctataagctggaggagtgcg

SEQ ID NO: 17112 - RNA, 22 nt, synthetic construct
  misc_feature 1..22: note = HBV-targeting guide sequence portion
  source 1..22: mol_type = other RNA
gtctccacctctgagaaacact

SEQ ID NO: 17113 - RNA, 22 nt, synthetic construct
  misc_feature 1..22: note = HBV-targeting guide sequence portion
  source 1..22: mol_type = other RNA
gtctccatgcgacgtgcagagg

SEQ ID NO: 17114 - RNA, 22 nt, synthetic construct
  misc_feature 1..22: note = HBV-targeting guide sequence portion
  source 1..22: mol_type = other RNA
gtctccggaagtgttgatagga

SEQ ID NO: 17115 - RNA, 22 nt, synthetic construct
  misc_feature 1..22: note = HBV-targeting guide sequence portion
  source 1..22: mol_type = other RNA
gtctcctgagcattgttcacct

SEQ ID NO: 17116 - RNA, 22 nt, synthetic construct
  misc_feature 1..22: note = HBV-targeting guide sequence portion
  source 1..22: mol_type = other RNA
gtctgaactttaggcccatatg

SEQ ID NO: 17117 - RNA, 22 nt, synthetic construct
  misc_feature 1..22: note = HBV-targeting guide sequence portion
  source 1..22: mol_type = other RNA
gtctgcgaggcgagggagttct

SEQ ID NO: 17118 - RNA, 22 nt, synthetic construct
  misc_feature 1..22: note = HBV-targeting guide sequence portion
  source 1..22: mol_type = other RNA
gtctgcgcaccagcaccatgca

SEQ ID NO: 17119 - RNA, 22 nt, synthetic construct
  misc_feature 1..22: note = HBV-targeting guide sequence portion
  source 1..22: mol_type = other RNA
gtctgcggcgttttatcatctt

SEQ ID NO: 17120 - RNA, 22 nt, synthetic construct
  misc_feature 1..22: note = HBV-targeting guide sequence portion
  source 1..22: mol_type = other RNA
gtctggagcaaacattctcggg

SEQ ID NO: 17121 - RNA, 22 nt, synthetic construct
  misc_feature 1..22: note = HBV-targeting guide sequence portion
  source 1..22: mol_type = other RNA
gtctggccagggatccttgttg

SEQ ID NO: 17122 - RNA, 22 nt, synthetic construct
  misc_feature 1..22: note = HBV-targeting guide sequence portion
  source 1..22: mol_type = other RNA
gtctgtacagcatcttgagtcc

SEQ ID NO: 17123 - RNA, 22 nt, synthetic construct
  misc_feature 1..22: note = HBV-targeting guide sequence portion
  source 1..22: mol_type = other RNA
gtctgtcctctaattccaggat

SEQ ID NO: 17124 - RNA, 22 nt, synthetic construct
  misc_feature 1..22: note = HBV-targeting guide sequence portion
  source 1..22: mol_type = other RNA
gtctgtgccaagtgtttgctga

SEQ ID NO: 17125 - RNA, 22 nt, synthetic construct
  misc_feature 1..22: note = HBV-targeting guide sequence portion
  source 1..22: mol_type = other RNA
gtctgtgccttctcatctgccg

SEQ ID NO: 17126 - RNA, 22 nt, synthetic construct
  misc_feature 1..22: note = HBV-targeting guide sequence portion
  source 1..22: mol_type = other RNA
gtcttacataagaggactcttg

SEQ ID NO: 17127 - RNA, 22 nt, synthetic construct
  misc_feature 1..22: note = HBV-targeting guide sequence portion
  source 1..22: mol_type = other RNA
gtcttacttttggaagagaaac

SEQ ID NO: 17128 - RNA, 22 nt, synthetic construct
  misc_feature 1..22: note = HBV-targeting guide sequence portion
  source 1..22: mol_type = other RNA
gtcttctgggttttgctgcccc

SEQ ID NO: 17129 - RNA, 22 nt, synthetic construct
  misc_feature 1..22: note = HBV-targeting guide sequence portion
  source 1..22: mol_type = other RNA
gtcttggccaaaattcgcagtc

SEQ ID NO: 17130 - RNA, 22 nt, synthetic construct
  misc_feature 1..22: note = HBV-targeting guide sequence portion
  source 1..22: mol_type = other RNA
gtctttaaacaaacagtctttg

SEQ ID NO: 17131 - RNA, 22 nt, synthetic construct
  misc_feature 1..22: note = HBV-targeting guide sequence portion
  source 1..22: mol_type = other RNA
gtctttaaccctcattggaaaa

SEQ ID NO: 17132 - RNA, 22 nt, synthetic construct
  misc_feature 1..22: note = HBV-targeting guide sequence portion
  source 1..22: mol_type = other RNA
gtctttgaagtatgcctcaagg

SEQ ID NO: 17133 - RNA, 22 nt, synthetic construct
  misc_feature 1..22: note = HBV-targeting guide sequence portion
  source 1..22: mol_type = other RNA
gtctttgggtgtacatttaaac

SEQ ID NO: 17134 - RNA, 22 nt, synthetic construct
  misc_feature 1..22: note = HBV-targeting guide sequence portion
  source 1..22: mol_type = other RNA
gtcttttctcattaactgtaag

SEQ ID NO: 17135 - RNA, 22 nt, synthetic construct
  misc_feature 1..22: note = HBV-targeting guide sequence portion
  source 1..22: mol_type = other RNA
gtcttttggagtgtggattcgc

SEQ ID NO: 17136 - RNA, 22 nt, synthetic construct
  misc_feature 1..22: note = HBV-targeting guide sequence portion
  source 1..22: mol_type = other RNA
gtgaaaaagttgcatggtgctg

SEQ ID NO: 17137 - RNA, 22 nt, synthetic construct
  misc_feature 1..22: note = HBV-targeting guide sequence portion
  source 1..22: mol_type = other RNA
gtgaaaccacaatagttgtctg

SEQ ID NO: 17138 - RNA, 22 nt, synthetic construct
  misc_feature 1..22: note = HBV-targeting guide sequence portion
  source 1..22: mol_type = other RNA
gtgaaagcctgcttagattgaa

SEQ ID NO: 17139 - RNA, 22 nt, synthetic construct
  misc_feature 1..22: note = HBV-targeting guide sequence portion
  source 1..22: mol_type = other RNA
gtgaacaatgctcaggagactc

SEQ ID NO: 17140 - RNA, 22 nt, synthetic construct
  misc_feature 1..22: note = HBV-targeting guide sequence portion
  source 1..22: mol_type = other RNA
gtgaacagtttgtaggcccgct

SEQ ID NO: 17141 - RNA, 22 nt, synthetic construct
  misc_feature 1..22: note = HBV-targeting guide sequence portion
  source 1..22: mol_type = other RNA
gtgaaccctagcccgaatgctc

SEQ ID NO: 17142 - RNA, 22 nt, synthetic construct
  misc_feature 1..22: note = HBV-targeting guide sequence portion
  source 1..22: mol_type = other RNA
gtgaacgcccaccaattcttgc

SEQ ID NO: 17143 - RNA, 22 nt, synthetic construct
  misc_feature 1..22: note = HBV-targeting guide sequence portion
  source 1..22: mol_type = other RNA
gtgaagcgaagtgcacacggtc

SEQ ID NO: 17144 - RNA, 22 nt, synthetic construct
  misc_feature 1..22: note = HBV-targeting guide sequence portion
  source 1..22: mol_type = other RNA
gtgaatttaggataaaacctag

SEQ ID NO: 17145 - RNA, 22 nt, synthetic construct
  misc_feature 1..22: note = HBV-targeting guide sequence portion
  source 1..22: mol_type = other RNA
gtgacccacagaatgaggcgct

SEQ ID NO: 17146 - RNA, 22 nt, synthetic construct
  misc_feature 1..22: note = HBV-targeting guide sequence portion
  source 1..22: mol_type = other RNA
gtgagaggcagtagtcggaaca

SEQ ID NO: 17147 - RNA, 22 nt, synthetic construct
  misc_feature 1..22: note = HBV-targeting guide sequence portion
  source 1..22: mol_type = other RNA
gtgagaggcctgtatctccctg

SEQ ID NO: 17148 - RNA, 22 nt, synthetic construct
  misc_feature 1..22: note = HBV-targeting guide sequence portion
  source 1..22: mol_type = other RNA
gtgaggattcttgtcaacaagg

SEQ ID NO: 17149 - RNA, 22 nt, synthetic construct
  misc_feature 1..22: note = HBV-targeting guide sequence portion
  source 1..22: mol_type = other RNA
gtgaggtgaacaatgctcagga

SEQ ID NO: 17150 - RNA, 22 nt, synthetic construct
  misc_feature 1..22: note = HBV-targeting guide sequence portion
  source 1..22: mol_type = other RNA
gtgagtgattggaggttgggga

SEQ ID NO: 17151 - RNA, 22 nt, synthetic construct
  misc_feature 1..22: note = HBV-targeting guide sequence portion
  source 1..22: mol_type = other RNA
gtgatgttctccatgttcagcg

SEQ ID NO: 17152 - RNA, 22 nt, synthetic construct
  misc_feature 1..22: note = HBV-targeting guide sequence portion
  source 1..22: mol_type = other RNA
gtgattggaggttggggactgc

SEQ ID NO: 17153 - RNA, 22 nt, synthetic construct
  misc_feature 1..22: note = HBV-targeting guide sequence portion
  source 1..22: mol_type = other RNA
gtgattttgtggcaatgatccc

SEQ ID NO: 17154 - RNA, 22 nt, synthetic construct
  misc_feature 1..22: note = HBV-targeting guide sequence portion
  source 1..22: mol_type = other RNA
gtgcacacggtccggcagatga

SEQ ID NO: 17155 - RNA, 22 nt, synthetic construct
  misc_feature 1..22: note = HBV-targeting guide sequence portion
  source 1..22: mol_type = other RNA
gtgcacttcgcttcacctctgc

SEQ ID NO: 17156 - RNA, 22 nt, synthetic construct
  misc_feature 1..22: note = HBV-targeting guide sequence portion
  source 1..22: mol_type = other RNA
gtgcagaggtgaagcgaagtgc

SEQ ID NO: 17157 - RNA, 22 nt, synthetic construct
  misc_feature 1..22: note = HBV-targeting guide sequence portion
  source 1..22: mol_type = other RNA
gtgcaggttctgcagggtcccg

SEQ ID NO: 17158 - RNA, 22 nt, synthetic construct
  misc_feature 1..22: note = HBV-targeting guide sequence portion
  source 1..22: mol_type = other RNA
gtgcagtatggtgaggtgaaca

SEQ ID NO: 17159 - RNA, 22 nt, synthetic construct
  misc_feature 1..22: note = HBV-targeting guide sequence portion
  source 1..22: mol_type = other RNA
gtgcagtttccatccgaaggtt

SEQ ID NO: 17160 - RNA, 22 nt, synthetic construct
  misc_feature 1..22: note = HBV-targeting guide sequence portion
  source 1..22: mol_type = other RNA
gtgccaagtgtttgctgatgca

SEQ ID NO: 17161 - RNA, 22 nt, synthetic construct
  misc_feature 1..22: note = HBV-targeting guide sequence portion
  source 1..22: mol_type = other RNA
gtgccatttgttcagtggttcg

SEQ ID NO: 17162 - RNA, 22 nt, synthetic construct
  misc_feature 1..22: note = HBV-targeting guide sequence portion
  source 1..22: mol_type = other RNA
gtgccttctcatctgccggacc

SEQ ID NO: 17163 - RNA, 22 nt, synthetic construct
  misc_feature 1..22: note = HBV-targeting guide sequence portion
  source 1..22: mol_type = other RNA
gtgccttgggtggctttagggc

SEQ ID NO: 17164 - RNA, 22 nt, synthetic construct
  misc_feature 1..22: note = HBV-targeting guide sequence portion
  source 1..22: mol_type = other RNA
gtgcgaatccacactccaaaag

SEQ ID NO: 17165 - RNA, 22 nt, synthetic construct
  misc_feature 1..22: note = HBV-targeting guide sequence portion
  source 1..22: mol_type = other RNA
gtgcgcagaccaatttatgcct

SEQ ID NO: 17166 - RNA, 22 nt, synthetic construct
  misc_feature 1..22: note = HBV-targeting guide sequence portion
  source 1..22: mol_type = other RNA
gtgcgccccgtggtcggtcgga

SEQ ID NO: 17167 - RNA, 22 nt, synthetic construct
  misc_feature 1..22: note = HBV-targeting guide sequence portion
  source 1..22: mol_type = other RNA
gtgcggtggggtgaaccctagc

SEQ ID NO: 17168 - RNA, 22 nt, synthetic construct
  misc_feature 1..22: note = HBV-targeting guide sequence portion
  source 1..22: mol_type = other RNA
gtgctgccaactggatcctgcg

SEQ ID NO: 17169 - RNA, 22 nt, synthetic construct
  misc_feature 1..22: note = HBV-targeting guide sequence portion
  source 1..22: mol_type = other RNA
gtgctggtgcgcagaccaattt

SEQ ID NO: 17170 - RNA, 22 nt, synthetic construct
  misc_feature 1..22: note = HBV-targeting guide sequence portion
  source 1..22: mol_type = other RNA
gtgctggtggttgatgatcctg

SEQ ID NO: 17171 - RNA, 22 nt, synthetic construct
  misc_feature 1..22: note = HBV-targeting guide sequence portion
  source 1..22: mol_type = other RNA
gtggaaagattctgccccatgc

SEQ ID NO: 17172 - RNA, 22 nt, synthetic construct
  misc_feature 1..22: note = HBV-targeting guide sequence portion
  source 1..22: mol_type = other RNA
gtggaacctttccggctcctct

SEQ ID NO: 17173 - RNA, 22 nt, synthetic construct
  misc_feature 1..22: note = HBV-targeting guide sequence portion
  source 1..22: mol_type = other RNA
gtggacttctctcaattttcta

SEQ ID NO: 17174 - RNA, 22 nt, synthetic construct
  misc_feature 1..22: note = HBV-targeting guide sequence portion
  source 1..22: mol_type = other RNA
gtggagacagcggggtaggctg

SEQ ID NO: 17175 - RNA, 22 nt, synthetic construct
  misc_feature 1..22: note = HBV-targeting guide sequence portion
  source 1..22: mol_type = other RNA
gtggagccctcaggctcagggc

SEQ ID NO: 17176 - RNA, 22 nt, synthetic construct
  misc_feature 1..22: note = HBV-targeting guide sequence portion
  source 1..22: mol_type = other RNA
gtggagttactctcgtttttgc

SEQ ID NO: 17177 - RNA, 22 nt, synthetic construct
  misc_feature 1..22: note = HBV-targeting guide sequence portion
  source 1..22: mol_type = other RNA
gtggattcgcactcctccagct

SEQ ID NO: 17178 - RNA, 22 nt, synthetic construct
  misc_feature 1..22: note = HBV-targeting guide sequence portion
  source 1..22: mol_type = other RNA
gtggcaatgatccccaacaatc

SEQ ID NO: 17179 - RNA, 22 nt, synthetic construct
  misc_feature 1..22: note = HBV-targeting guide sequence portion
  source 1..22: mol_type = other RNA
gtggctccagttcaggaacagt

SEQ ID NO: 17180 - RNA, 22 nt, synthetic construct
  misc_feature 1..22: note = HBV-targeting guide sequence portion
  source 1..22: mol_type = other RNA
gtggctttagggcatggacatt

SEQ ID NO: 17181 - RNA, 22 nt, synthetic construct
  misc_feature 1..22: note = HBV-targeting guide sequence portion
  source 1..22: mol_type = other RNA
gtgggaaattttacggggcttt

SEQ ID NO: 17182 - RNA, 22 nt, synthetic construct
  misc_feature 1..22: note = HBV-targeting guide sequence portion
  source 1..22: mol_type = other RNA
gtgggcctcagcccgtttctct

SEQ ID NO: 17183 - RNA, 22 nt, synthetic construct
  misc_feature 1..22: note = HBV-targeting guide sequence portion
  source 1..22: mol_type = other RNA
gtgggcgttcacggtggtctcc

SEQ ID NO: 17184 - RNA, 22 nt, synthetic construct
  misc_feature 1..22: note = HBV-targeting guide sequence portion
  source 1..22: mol_type = other RNA
gtgggggaaagccctacgaacc

SEQ ID NO: 17185 - RNA, 22 nt, synthetic construct
  misc_feature 1..22: note = HBV-targeting guide sequence portion
  source 1..22: mol_type = other RNA
gtgggggttgcatcagcaaaca

SEQ ID NO: 17186 - RNA, 22 nt, synthetic construct
  misc_feature 1..22: note = HBV-targeting guide sequence portion
  source 1..22: mol_type = other RNA
gtggggtgaaccctagcccgaa

SEQ ID NO: 17187 - RNA, 22 nt, synthetic construct
  misc_feature 1..22: note = HBV-targeting guide sequence portion
  source 1..22: mol_type = other RNA
gtgggtactaatttagaagatc

SEQ ID NO: 17188 - RNA, 22 nt, synthetic construct
  misc_feature 1..22: note = HBV-targeting guide sequence portion
  source 1..22: mol_type = other RNA
gtgggtcaccatattcttggga

SEQ ID NO: 17189 - RNA, 22 nt, synthetic construct
  misc_feature 1..22: note = HBV-targeting guide sequence portion
  source 1..22: mol_type = other RNA
gtgggtcttctgggttttgctg

SEQ ID NO: 17190 - RNA, 22 nt, synthetic construct
  misc_feature 1..22: note = HBV-targeting guide sequence portion
  source 1..22: mol_type = other RNA
gtggtattgggggccaagtctg

SEQ ID NO: 17191 - RNA, 22 nt, synthetic construct
  misc_feature 1..22: note = HBV-targeting guide sequence portion
  source 1..22: mol_type = other RNA
gtggtcgggaaagaatcccaga

SEQ ID NO: 17192 - RNA, 22 nt, synthetic construct
  misc_feature 1..22: note = HBV-targeting guide sequence portion
  source 1..22: mol_type = other RNA
gtggtcggtcggaacggcaggc

SEQ ID NO: 17193 - RNA, 22 nt, synthetic construct
  misc_feature 1..22: note = HBV-targeting guide sequence portion
  source 1..22: mol_type = other RNA
gtggtctataagctggaggagt

SEQ ID NO: 17194 - RNA, 22 nt, synthetic construct
  misc_feature 1..22: note = HBV-targeting guide sequence portion
  source 1..22: mol_type = other RNA
gtggtctccatgcgacgtgcag

SEQ ID NO: 17195 - RNA, 22 nt, synthetic construct
  misc_feature 1..22: note = HBV-targeting guide sequence portion
  source 1..22: mol_type = other RNA
gtggtggacttctctcaatttt

SEQ ID NO: 17196 - RNA, 22 nt, synthetic construct
  misc_feature 1..22: note = HBV-targeting guide sequence portion
  source 1..22: mol_type = other RNA
gtggttatcctgctttaatgcc

SEQ ID NO: 17197 - RNA, 22 nt, synthetic construct
  misc_feature 1..22: note = HBV-targeting guide sequence portion
  source 1..22: mol_type = other RNA
gtggttcgtagggctttccccc

SEQ ID NO: 17198 - RNA, 22 nt, synthetic construct
  misc_feature 1..22: note = HBV-targeting guide sequence portion
  source 1..22: mol_type = other RNA
gtggttgatgatcctggaatta

SEQ ID NO: 17199 - RNA, 22 nt, synthetic construct
  misc_feature 1..22: note = HBV-targeting guide sequence portion
  source 1..22: mol_type = other RNA
gtggtttcacatttcttgtctt

SEQ ID NO: 17200 - RNA, 22 nt, synthetic construct
  misc_feature 1..22: note = HBV-targeting guide sequence portion
  source 1..22: mol_type = other RNA
gtgtaaaaggggcagcaaaacc

SEQ ID NO: 17201 - RNA, 22 nt, synthetic construct
  misc_feature 1..22: note = HBV-targeting guide sequence portion
  source 1..22: mol_type = other RNA
gtgtaaacaatacctgaacctt

SEQ ID NO: 17202 - RNA, 22 nt, synthetic construct
  misc_feature 1..22: note = HBV-targeting guide sequence portion
  source 1..22: mol_type = other RNA
gtgtaaatagtgtctagtttgg

SEQ ID NO: 17203 - RNA, 22 nt, synthetic construct
  misc_feature 1..22: note = HBV-targeting guide sequence portion
  source 1..22: mol_type = other RNA
gtgtacatttaaaccctaacaa

SEQ ID NO: 17204 - RNA, 22 nt, synthetic construct
  misc_feature 1..22: note = HBV-targeting guide sequence portion
  source 1..22: mol_type = other RNA
gtgtagatgtatattaggaaaa

SEQ ID NO: 17205 - RNA, 22 nt, synthetic construct
  misc_feature 1..22: note = HBV-targeting guide sequence portion
  source 1..22: mol_type = other RNA
gtgtatgatgtgattttgtggc

SEQ ID NO: 17206 - RNA, 22 nt, synthetic construct
  misc_feature 1..22: note = HBV-targeting guide sequence portion
  source 1..22: mol_type = other RNA
gtgtcaacacatagcgcctcat

SEQ ID NO: 17207 - RNA, 22 nt, synthetic construct
  misc_feature 1..22: note = HBV-targeting guide sequence portion
  source 1..22: mol_type = other RNA
gtgtcaacgaattgtgggtctt

SEQ ID NO: 17208 - RNA, 22 nt, synthetic construct
  misc_feature 1..22: note = HBV-targeting guide sequence portion
  source 1..22: mol_type = other RNA
gtgtctagtttggaagtaatga

SEQ ID NO: 17209 - RNA, 22 nt, synthetic construct
  misc_feature 1..22: note = HBV-targeting guide sequence portion
  source 1..22: mol_type = other RNA
gtgtctgcggcgttttatcatc

SEQ ID NO: 17210 - RNA, 22 nt, synthetic construct
  misc_feature 1..22: note = HBV-targeting guide sequence portion
  source 1..22: mol_type = other RNA
gtgtcttggccaaaattcgcag

SEQ ID NO: 17211 - RNA, 22 nt, synthetic construct
  misc_feature 1..22: note = HBV-targeting guide sequence portion
  source 1..22: mol_type = other RNA
gtgtcttttggagtgtggattc

SEQ ID NO: 17212 - RNA, 22 nt, synthetic construct
  misc_feature 1..22: note = HBV-targeting guide sequence portion
  source 1..22: mol_type = other RNA
gtgtgcacttcgcttcacctct

SEQ ID NO: 17213 - RNA, 22 nt, synthetic construct
  misc_feature 1..22: note = HBV-targeting guide sequence portion
  source 1..22: mol_type = other RNA
gtgtggattcgcactcctccag

SEQ ID NO: 17214 - RNA, 22 nt, synthetic construct
  misc_feature 1..22: note = HBV-targeting guide sequence portion
  source 1..22: mol_type = other RNA
gtgtgtaaatagtgtctagttt

SEQ ID NO: 17215 - RNA, 22 nt, synthetic construct
  misc_feature 1..22: note = HBV-targeting guide sequence portion
  source 1..22: mol_type = other RNA
gtgtgtcaacgaattgtgggtc

SEQ ID NO: 17216 - RNA, 22 nt, synthetic construct
  misc_feature 1..22: note = HBV-targeting guide sequence portion
  source 1..22: mol_type = other RNA
gtgtgtcttggccaaaattcgc

SEQ ID NO: 17217 - RNA, 22 nt, synthetic construct
  misc_feature 1..22: note = HBV-targeting guide sequence portion
  source 1..22: mol_type = other RNA
gtgttacaggcggggttttcct

SEQ ID NO: 17218 - RNA, 22 nt, synthetic construct
  misc_feature 1..22: note = HBV-targeting guide sequence portion
  source 1..22: mol_type = other RNA
gtgttgacactctcttatataa

SEQ ID NO: 17219 - RNA, 22 nt, synthetic construct
  misc_feature 1..22: note = HBV-targeting guide sequence portion
  source 1..22: mol_type = other RNA
gtgttgacataactgactacta

SEQ ID NO: 17220 - RNA, 22 nt, synthetic construct
  misc_feature 1..22: note = HBV-targeting guide sequence portion
  source 1..22: mol_type = other RNA
gtgttgataggataggggcatt

SEQ ID NO: 17221 - RNA, 22 nt, synthetic construct
  misc_feature 1..22: note = HBV-targeting guide sequence portion
  source 1..22: mol_type = other RNA
gtgttgttagacgacgaggcag

SEQ ID NO: 17222 - RNA, 22 nt, synthetic construct
  misc_feature 1..22: note = HBV-targeting guide sequence portion
  source 1..22: mol_type = other RNA
gtgtttctcagaggtggagaca

SEQ ID NO: 17223 - RNA, 22 nt, synthetic construct
  misc_feature 1..22: note = HBV-targeting guide sequence portion
  source 1..22: mol_type = other RNA
gtgtttgctgatgcaaccccca

SEQ ID NO: 17224 - RNA, 22 nt, synthetic construct
  misc_feature 1..22: note = HBV-targeting guide sequence portion
  source 1..22: mol_type = other RNA
gtgttttatataagagagtgtc

SEQ ID NO: 17225 - RNA, 22 nt, synthetic construct
  misc_feature 1..22: note = HBV-targeting guide sequence portion
  source 1..22: mol_type = other RNA
gtgttttccaatgagggttaaa

SEQ ID NO: 17226 - RNA, 22 nt, synthetic construct
  misc_feature 1..22: note = HBV-targeting guide sequence portion
  source 1..22: mol_type = other RNA
gttaaagacaggtacagtagaa

SEQ ID NO: 17227 - RNA, 22 nt, synthetic construct
  misc_feature 1..22: note = HBV-targeting guide sequence portion
  source 1..22: mol_type = other RNA
gttaacaggcctattgattgga

SEQ ID NO: 17228 - RNA, 22 nt, synthetic construct
  misc_feature 1..22: note = HBV-targeting guide sequence portion
  source 1..22: mol_type = other RNA
gttaaccgggagttttctgaaa

SEQ ID NO: 17229 - RNA, 22 nt, synthetic construct
  misc_feature 1..22: note = HBV-targeting guide sequence portion
  source 1..22: mol_type = other RNA
gttaatcattacttccaaacta

SEQ ID NO: 17230 - RNA, 22 nt, synthetic construct
  misc_feature 1..22: note = HBV-targeting guide sequence portion
  source 1..22: mol_type = other RNA
gttaatgagaaaagacggttga

SEQ ID NO: 17231 - RNA, 22 nt, synthetic construct
  misc_feature 1..22: note = HBV-targeting guide sequence portion
  source 1..22: mol_type = other RNA
gttacaggcggggttttccttg

SEQ ID NO: 17232 - RNA, 22 nt, synthetic construct
  misc_feature 1..22: note = HBV-targeting guide sequence portion
  source 1..22: mol_type = other RNA
gttaccaattttcttttgtctt

SEQ ID NO: 17233 - RNA, 22 nt, synthetic construct
  misc_feature 1..22: note = HBV-targeting guide sequence portion
  source 1..22: mol_type = other RNA
gttactctcgtttttgccttct

SEQ ID NO: 17234 - RNA, 22 nt, synthetic construct
  misc_feature 1..22: note = HBV-targeting guide sequence portion
  source 1..22: mol_type = other RNA
gttagacgacgaggcaggtccc

SEQ ID NO: 17235 - RNA, 22 nt, synthetic construct
  misc_feature 1..22: note = HBV-targeting guide sequence portion
  source 1..22: mol_type = other RNA
gttagggtttaaatgtacaccc

SEQ ID NO: 17236 - RNA, 22 nt, synthetic construct
  misc_feature 1..22: note = HBV-targeting guide sequence portion
  source 1..22: mol_type = other RNA
gttagtatcccttggactcata

SEQ ID NO: 17237 - RNA, 22 nt, synthetic construct
  misc_feature 1..22: note = HBV-targeting guide sequence portion
  source 1..22: mol_type = other RNA
gttatatggatgatgtggtatt

SEQ ID NO: 17238 - RNA, 22 nt, synthetic construct
  misc_feature 1..22: note = HBV-targeting guide sequence portion
  source 1..22: mol_type = other RNA
gttatcctgctttaatgccctt

SEQ ID NO: 17239 - RNA, 22 nt, synthetic construct
  misc_feature 1..22: note = HBV-targeting guide sequence portion
  source 1..22: mol_type = other RNA
gttatcgctggatgtgtctgcg

SEQ ID NO: 17240 - RNA, 22 nt, synthetic construct
  misc_feature 1..22: note = HBV-targeting guide sequence portion
  source 1..22: mol_type = other RNA
gttatgtcaacactcatatggg

SEQ ID NO: 17241 - RNA, 22 nt, synthetic construct
  misc_feature 1..22: note = HBV-targeting guide sequence portion
  source 1..22: mol_type = other RNA
gttattctcttaatttcatggg

SEQ ID NO: 17242 - RNA, 22 nt, synthetic construct
  misc_feature 1..22: note = HBV-targeting guide sequence portion
  source 1..22: mol_type = other RNA
gttcaagcctccaagctgtgcc

SEQ ID NO: 17243 - RNA, 22 nt, synthetic construct
  misc_feature 1..22: note = HBV-targeting guide sequence portion
  source 1..22: mol_type = other RNA
gttcacattttttgataatatc

SEQ ID NO: 17244 - RNA, 22 nt, synthetic construct
  misc_feature 1..22: note = HBV-targeting guide sequence portion
  source 1..22: mol_type = other RNA
gttcaccccaccgcacggaggc

SEQ ID NO: 17245 - RNA, 22 nt, synthetic construct
  misc_feature 1..22: note = HBV-targeting guide sequence portion
  source 1..22: mol_type = other RNA
gttcacctcaccatactgcact

SEQ ID NO: 17246 - RNA, 22 nt, synthetic construct
  misc_feature 1..22: note = HBV-targeting guide sequence portion
  source 1..22: mol_type = other RNA
gttcacggtggtctccatgcga

SEQ ID NO: 17247 - RNA, 22 nt, synthetic construct
  misc_feature 1..22: note = HBV-targeting guide sequence portion
  source 1..22: mol_type = other RNA
gttcagacaactattgtggttt

SEQ ID NO: 17248 - RNA, 22 nt, synthetic construct
  misc_feature 1..22: note = HBV-targeting guide sequence portion
  source 1..22: mol_type = other RNA
gttcagcgcagggtccccaatc

SEQ ID NO: 17249 - RNA, 22 nt, synthetic construct
  misc_feature 1..22: note = HBV-targeting guide sequence portion
  source 1..22: mol_type = other RNA
gttcaggaacagtaaaccctgt

SEQ ID NO: 17250 - RNA, 22 nt, synthetic construct
  misc_feature 1..22: note = HBV-targeting guide sequence portion
  source 1..22: mol_type = other RNA
gttcaggtattgtttacacaga

SEQ ID NO: 17251 - RNA, 22 nt, synthetic construct
  misc_feature 1..22: note = HBV-targeting guide sequence portion
  source 1..22: mol_type = other RNA
gttcagtggttcgtagggcttt

SEQ ID NO: 17252 - RNA, 22 nt, synthetic construct
  misc_feature 1..22: note = HBV-targeting guide sequence portion
  source 1..22: mol_type = other RNA
gttcatgtcctactgttcaagc

SEQ ID NO: 17253 - RNA, 22 nt, synthetic construct
  misc_feature 1..22: note = HBV-targeting guide sequence portion
  source 1..22: mol_type = other RNA
gttccacgcatgcgctgatggc

SEQ ID NO: 17254 - RNA, 22 nt, synthetic construct
  misc_feature 1..22: note = HBV-targeting guide sequence portion
  source 1..22: mol_type = other RNA
gttcccaagaatatggtgaccc

SEQ ID NO: 17255 - RNA, 22 nt, synthetic construct
  misc_feature 1..22: note = HBV-targeting guide sequence portion
  source 1..22: mol_type = other RNA
gttcccatggctgctaggctgt

SEQ ID NO: 17256 - RNA, 22 nt, synthetic construct
  misc_feature 1..22: note = HBV-targeting guide sequence portion
  source 1..22: mol_type = other RNA
gttccccctagaaaattgagag

SEQ ID NO: 17257 - RNA, 22 nt, synthetic construct
  misc_feature 1..22: note = HBV-targeting guide sequence portion
  source 1..22: mol_type = other RNA
gttccgaccgaccacggggcgc

SEQ ID NO: 17258 - RNA, 22 nt, synthetic construct
  misc_feature 1..22: note = HBV-targeting guide sequence portion
  source 1..22: mol_type = other RNA
gttccgactactgcctctcaca

SEQ ID NO: 17259 - RNA, 22 nt, synthetic construct
  misc_feature 1..22: note = HBV-targeting guide sequence portion
  source 1..22: mol_type = other RNA
gttccgcagtatggatcggcag

SEQ ID NO: 17260 - RNA, 22 nt, synthetic construct
  misc_feature 1..22: note = HBV-targeting guide sequence portion
  source 1..22: mol_type = other RNA
gttcctgaactggagccaccag

SEQ ID NO: 17261 - RNA, 22 nt, synthetic construct
  misc_feature 1..22: note = HBV-targeting guide sequence portion
  source 1..22: mol_type = other RNA
gttccttgagcaggagtcgtgc

SEQ ID NO: 17262 - RNA, 22 nt, synthetic construct
  misc_feature 1..22: note = HBV-targeting guide sequence portion
  source 1..22: mol_type = other RNA
gttcgtagggctttcccccact

SEQ ID NO: 17263 - RNA, 22 nt, synthetic construct
  misc_feature 1..22: note = HBV-targeting guide sequence portion
  source 1..22: mol_type = other RNA
gttctccatgttcagcgcaggg

SEQ ID NO: 17264 - RNA, 22 nt, synthetic construct
  misc_feature 1..22: note = HBV-targeting guide sequence portion
  source 1..22: mol_type = other RNA
gttctccccagcaaagaattgc

SEQ ID NO: 17265 - RNA, 22 nt, synthetic construct
  misc_feature 1..22: note = HBV-targeting guide sequence portion
  source 1..22: mol_type = other RNA
gttctgcagggtcccgtgctgg

SEQ ID NO: 17266 - RNA, 22 nt, synthetic construct
  misc_feature 1..22: note = HBV-targeting guide sequence portion
  source 1..22: mol_type = other RNA
gttctggataataaggtttaat

SEQ ID NO: 17267 - RNA, 22 nt, synthetic construct
  misc_feature 1..22: note = HBV-targeting guide sequence portion
  source 1..22: mol_type = other RNA
gttcttctggactatcaaggta

SEQ ID NO: 17268 - RNA, 22 nt, synthetic construct
  misc_feature 1..22: note = HBV-targeting guide sequence portion
  source 1..22: mol_type = other RNA
gttcttcttctaggggacctgc

SEQ ID NO: 17269 - RNA, 22 nt, synthetic construct
  misc_feature 1..22: note = HBV-targeting guide sequence portion
  source 1..22: mol_type = other RNA
gttgaaattgattatgcctgct

SEQ ID NO: 17270 - RNA, 22 nt, synthetic construct
  misc_feature 1..22: note = HBV-targeting guide sequence portion
  source 1..22: mol_type = other RNA
gttgacaagaatcctcacaata

SEQ ID NO: 17271 - RNA, 22 nt, synthetic construct
  misc_feature 1..22: note = HBV-targeting guide sequence portion
  source 1..22: mol_type = other RNA
gttgacacactttccaatcaat

SEQ ID NO: 17272 - RNA, 22 nt, synthetic construct
  misc_feature 1..22: note = HBV-targeting guide sequence portion
  source 1..22: mol_type = other RNA
gttgacactctcttatataaaa

SEQ ID NO: 17273 - RNA, 22 nt, synthetic construct
  misc_feature 1..22: note = HBV-targeting guide sequence portion
  source 1..22: mol_type = other RNA
gttgacataactgactactagg

SEQ ID NO: 17274 - RNA, 22 nt, synthetic construct
  misc_feature 1..22: note = HBV-targeting guide sequence portion
  source 1..22: mol_type = other RNA
gttgacattgcagagagtccaa

SEQ ID NO: 17275 - RNA, 22 nt, synthetic construct
  misc_feature 1..22: note = HBV-targeting guide sequence portion
  source 1..22: mol_type = other RNA
gttgataggataggggcatttg

SEQ ID NO: 17276 - RNA, 22 nt, synthetic construct
  misc_feature 1..22: note = HBV-targeting guide sequence portion
  source 1..22: mol_type = other RNA
gttgatgatcctggaattagag

SEQ ID NO: 17277 - RNA, 22 nt, synthetic construct
  misc_feature 1..22: note = HBV-targeting guide sequence portion
  source 1..22: mol_type = other RNA
gttgcatcagcaaacacttggc

SEQ ID NO: 17278 - RNA, 22 nt, synthetic construct
  misc_feature 1..22: note = HBV-targeting guide sequence portion
  source 1..22: mol_type = other RNA
gttgcatggtgctggtgcgcag

SEQ ID NO: 17279 - RNA, 22 nt, synthetic construct
  misc_feature 1..22: note = HBV-targeting guide sequence portion
  source 1..22: mol_type = other RNA
gttgccaggcaacggccaggtc

SEQ ID NO: 17280 - RNA, 22 nt, synthetic construct
  misc_feature 1..22: note = HBV-targeting guide sequence portion
  source 1..22: mol_type = other RNA
gttgcctggcaacggggtaaag

SEQ ID NO: 17281 - RNA, 22 nt, synthetic construct
  misc_feature 1..22: note = HBV-targeting guide sequence portion
  source 1..22: mol_type = other RNA
gttgctgtacaaaaccttcgga

SEQ ID NO: 17282 - RNA, 22 nt, synthetic construct
  misc_feature 1..22: note = HBV-targeting guide sequence portion
  source 1..22: mol_type = other RNA
gttggacccagccttcagagca

SEQ ID NO: 17283 - RNA, 22 nt, synthetic construct
  misc_feature 1..22: note = HBV-targeting guide sequence portion
  source 1..22: mol_type = other RNA
gttggaggacaggaggttggtg

SEQ ID NO: 17284 - RNA, 22 nt, synthetic construct
  misc_feature 1..22: note = HBV-targeting guide sequence portion
  source 1..22: mol_type = other RNA
gttggagtttgctctgaaggct

SEQ ID NO: 17285 - RNA, 22 nt, synthetic construct
  misc_feature 1..22: note = HBV-targeting guide sequence portion
  source 1..22: mol_type = other RNA
gttggcagcacagcctagcagc

SEQ ID NO: 17286 - RNA, 22 nt, synthetic construct
  misc_feature 1..22: note = HBV-targeting guide sequence portion
  source 1..22: mol_type = other RNA
gttggcgaaaaagtgaaagcct

SEQ ID NO: 17287 - RNA, 22 nt, synthetic construct
  misc_feature 1..22: note = HBV-targeting guide sequence portion
  source 1..22: mol_type = other RNA
gttggcgtctggccagggatcc

SEQ ID NO: 17288 - RNA, 22 nt, synthetic construct
  misc_feature 1..22: note = HBV-targeting guide sequence portion
  source 1..22: mol_type = other RNA
gttgggattgaagtcccaatct

SEQ ID NO: 17289 - RNA, 22 nt, synthetic construct
  misc_feature 1..22: note = HBV-targeting guide sequence portion
  source 1..22: mol_type = other RNA
gttggggactgcgaattttggc

SEQ ID NO: 17290 - RNA, 22 nt, synthetic construct
  misc_feature 1..22: note = HBV-targeting guide sequence portion
  source 1..22: mol_type = other RNA
gttggggatcattgccacaaaa

SEQ ID NO: 17291 - RNA, 22 nt, synthetic construct
  misc_feature 1..22: note = HBV-targeting guide sequence portion
  source 1..22: mol_type = other RNA
gttggggcttggtcataggcca

SEQ ID NO: 17292 - RNA, 22 nt, synthetic construct
  misc_feature 1..22: note = HBV-targeting guide sequence portion
  source 1..22: mol_type = other RNA
gttgggggaggagattagatta

SEQ ID NO: 17293 - RNA, 22 nt, synthetic construct
  misc_feature 1..22: note = HBV-targeting guide sequence portion
  source 1..22: mol_type = other RNA
gttggtgagtgattggaggttg

SEQ ID NO: 17294 - RNA, 22 nt, synthetic construct
  misc_feature 1..22: note = HBV-targeting guide sequence portion
  source 1..22: mol_type = other RNA
gttggttcttctggactatcaa

SEQ ID NO: 17295 - RNA, 22 nt, synthetic construct
  misc_feature 1..22: note = HBV-targeting guide sequence portion
  source 1..22: mol_type = other RNA
gttgtcagtcccgagaatgttt

SEQ ID NO: 17296 - RNA, 22 nt, synthetic construct
  misc_feature 1..22: note = HBV-targeting guide sequence portion
  source 1..22: mol_type = other RNA
gttgtcctctcccgcaaatata

SEQ ID NO: 17297 - RNA, 22 nt, synthetic construct
  misc_feature 1..22: note = HBV-targeting guide sequence portion
  source 1..22: mol_type = other RNA
gttgtctgaactttaggcccat

SEQ ID NO: 17298 - RNA, 22 nt, synthetic construct
  misc_feature 1..22: note = HBV-targeting guide sequence portion
  source 1..22: mol_type = other RNA
gttgttagacgacgaggcaggt

SEQ ID NO: 17299 - RNA, 22 nt, synthetic construct
  misc_feature 1..22: note = HBV-targeting guide sequence portion
  source 1..22: mol_type = other RNA
gtttaaagactgggaggagttg

SEQ ID NO: 17300 - RNA, 22 nt, synthetic construct
  misc_feature 1..22: note = HBV-targeting guide sequence portion
  source 1..22: mol_type = other RNA
gtttaaatgtacacccaaagac

SEQ ID NO: 17301 - RNA, 22 nt, synthetic construct
  misc_feature 1..22: note = HBV-targeting guide sequence portion
  source 1..22: mol_type = other RNA
gtttaatacccttatccaaggg

SEQ ID NO: 17302 - RNA, 22 nt, synthetic construct
  misc_feature 1..22: note = HBV-targeting guide sequence portion
  source 1..22: mol_type = other RNA
gtttacacagaaaggccttgta

SEQ ID NO: 17303 - RNA, 22 nt, synthetic construct
  misc_feature 1..22: note = HBV-targeting guide sequence portion
  source 1..22: mol_type = other RNA
gtttacgtcccgtcggcgctga

SEQ ID NO: 17304 - RNA, 22 nt, synthetic construct
  misc_feature 1..22: note = HBV-targeting guide sequence portion
  source 1..22: mol_type = other RNA
gtttactagtgccatttgttca

SEQ ID NO: 17305 - RNA, 22 nt, synthetic construct
  misc_feature 1..22: note = HBV-targeting guide sequence portion
  source 1..22: mol_type = other RNA
gtttactgttcctgaactggag

SEQ ID NO: 17306 - RNA, 22 nt, synthetic construct
  misc_feature 1..22: note = HBV-targeting guide sequence portion
  source 1..22: mol_type = other RNA
gtttcacatttcttgtcttact

SEQ ID NO: 17307 - RNA, 22 nt, synthetic construct
  misc_feature 1..22: note = HBV-targeting guide sequence portion
  source 1..22: mol_type = other RNA
gtttcagaaaactcccggttaa

SEQ ID NO: 17308 - RNA, 22 nt, synthetic construct
  misc_feature 1..22: note = HBV-targeting guide sequence portion
  source 1..22: mol_type = other RNA
gtttccatccgaaggttttgta

SEQ ID NO: 17309 - RNA, 22 nt, synthetic construct
  misc_feature 1..22: note = HBV-targeting guide sequence portion
  source 1..22: mol_type = other RNA
gtttcccgtctgtcctctaatt

SEQ ID NO: 17310 - RNA, 22 nt, synthetic construct
  misc_feature 1..22: note = HBV-targeting guide sequence portion
  source 1..22: mol_type = other RNA
gtttctcagaggtggagacagc

SEQ ID NO: 17311 - RNA, 22 nt, synthetic construct
  misc_feature 1..22: note = HBV-targeting guide sequence portion
  source 1..22: mol_type = other RNA
gtttctcttccaaaagtaagac

SEQ ID NO: 17312 - RNA, 22 nt, synthetic construct
  misc_feature 1..22: note = HBV-targeting guide sequence portion
  source 1..22: mol_type = other RNA
gtttctcttggctcagtttact

SEQ ID NO: 17313 - RNA, 22 nt, synthetic construct
  misc_feature 1..22: note = HBV-targeting guide sequence portion
  source 1..22: mol_type = other RNA
gtttgcattatgccctgagcct

SEQ ID NO: 17314 - RNA, 22 nt, synthetic construct
  misc_feature 1..22: note = HBV-targeting guide sequence portion
  source 1..22: mol_type = other RNA
gtttgctccagaccggctgcga

SEQ ID NO: 17315 - RNA, 22 nt, synthetic construct
  misc_feature 1..22: note = HBV-targeting guide sequence portion
  source 1..22: mol_type = other RNA
gtttgctctgaaggctgggtcc

SEQ ID NO: 17316 - RNA, 22 nt, synthetic construct
  misc_feature 1..22: note = HBV-targeting guide sequence portion
  source 1..22: mol_type = other RNA
gtttgctgatgcaacccccact

SEQ ID NO: 17317 - RNA, 22 nt, synthetic construct
  misc_feature 1..22: note = HBV-targeting guide sequence portion
  source 1..22: mol_type = other RNA
gtttggaagtaatgattaacta

SEQ ID NO: 17318 - RNA, 22 nt, synthetic construct
  misc_feature 1..22: note = HBV-targeting guide sequence portion
  source 1..22: mol_type = other RNA
gtttggctttcagttatatgga

SEQ ID NO: 17319 - RNA, 22 nt, synthetic construct
  misc_feature 1..22: note = HBV-targeting guide sequence portion
  source 1..22: mol_type = other RNA
gtttgtaggcccgcttacagtt

SEQ ID NO: 17320 - RNA, 22 nt, synthetic construct
  misc_feature 1..22: note = HBV-targeting guide sequence portion
  source 1..22: mol_type = other RNA
gtttgtttaaagactgggagga

SEQ ID NO: 17321 - RNA, 22 nt, synthetic construct
  misc_feature 1..22: note = HBV-targeting guide sequence portion
  source 1..22: mol_type = other RNA
gttttatataagagagtgtcaa

SEQ ID NO: 17322 - RNA, 22 nt, synthetic construct
  misc_feature 1..22: note = HBV-targeting guide sequence portion
  source 1..22: mol_type = other RNA
gttttatcatcttcctcttcat

SEQ ID NO: 17323 - RNA, 22 nt, synthetic construct
  misc_feature 1..22: note = HBV-targeting guide sequence portion
  source 1..22: mol_type = other RNA
gttttatcctaaattcaccaaa

SEQ ID NO: 17324 - RNA, 22 nt, synthetic construct
  misc_feature 1..22: note = HBV-targeting guide sequence portion
  source 1..22: mol_type = other RNA
gttttccaatgagggttaaaga

SEQ ID NO: 17325 - RNA, 22 nt, synthetic construct
  misc_feature 1..22: note = HBV-targeting guide sequence portion
  source 1..22: mol_type = other RNA
gttttccttgttgacaagaatc

SEQ ID NO: 17326 - RNA, 22 nt, synthetic construct
  misc_feature 1..22: note = HBV-targeting guide sequence portion
  source 1..22: mol_type = other RNA
gttttctgaaacattctttgat

SEQ ID NO: 17327 - RNA, 22 nt, synthetic construct
  misc_feature 1..22: note = HBV-targeting guide sequence portion
  source 1..22: mol_type = other RNA
gttttgctcgcagccggtctgg

SEQ ID NO: 17328 - RNA, 22 nt, synthetic construct
  misc_feature 1..22: note = HBV-targeting guide sequence portion
  source 1..22: mol_type = other RNA
gttttgctgccccttttacaca

SEQ ID NO: 17329 - RNA, 22 nt, synthetic construct
  misc_feature 1..22: note = HBV-targeting guide sequence portion
  source 1..22: mol_type = other RNA
gttttgtacagcaacaggaggg

SEQ ID NO: 17330 - RNA, 22 nt, synthetic construct
  misc_feature 1..22: note = HBV-targeting guide sequence portion
  source 1..22: mol_type = other RNA
gttttgttagggtttaaatgta

SEQ ID NO: 17331 - RNA, 22 nt, synthetic construct
  misc_feature 1..22: note = HBV-targeting guide sequence portion
  source 1..22: mol_type = other RNA
gtttttgccttctgacttcttt

SEQ ID NO: 17332 - RNA, 22 nt, synthetic construct
  misc_feature 1..22: note = HBV-targeting guide sequence portion
  source 1..22: mol_type = other RNA
taaaacacccgccttccataga

SEQ ID NO: 17333 - RNA, 22 nt, synthetic construct
  misc_feature 1..22: note = HBV-targeting guide sequence portion
  source 1..22: mol_type = other RNA
taaaacctagcaggcataatca

SEQ ID NO: 17334 - RNA, 22 nt, synthetic construct
  misc_feature 1..22: note = HBV-targeting guide sequence portion
  source 1..22: mol_type = other RNA
taaaacgccgcagacacatcca

SEQ ID NO: 17335 - RNA, 22 nt, synthetic construct
  misc_feature 1..22: note = HBV-targeting guide sequence portion
  source 1..22: mol_type = other RNA
taaaaggggcagcaaaacccag

SEQ ID NO: 17336 - RNA, 22 nt, synthetic construct
  misc_feature 1..22: note = HBV-targeting guide sequence portion
  source 1..22: mol_type = other RNA
taaaatttcccaccttatgagt

SEQ ID NO: 17337 - RNA, 22 nt, synthetic construct
  misc_feature 1..22: note = HBV-targeting guide sequence portion
  source 1..22: mol_type = other RNA
taaacaaacagtctttgaagta

SEQ ID NO: 17338 - RNA, 22 nt, synthetic construct
  misc_feature 1..22: note = HBV-targeting guide sequence portion
  source 1..22: mol_type = other RNA
taaacaaaggacgtcccgcgca

SEQ ID NO: 17339 - RNA, 22 nt, synthetic construct
  misc_feature 1..22: note = HBV-targeting guide sequence portion
  source 1..22: mol_type = other RNA
taaacaatacctgaacctttac

SEQ ID NO: 17340 - RNA, 22 nt, synthetic construct
  misc_feature 1..22: note = HBV-targeting guide sequence portion
  source 1..22: mol_type = other RNA
taaaccctaacaaaacaaagag

SEQ ID NO: 17341 - RNA, 22 nt, synthetic construct
  misc_feature 1..22: note = HBV-targeting guide sequence portion
  source 1..22: mol_type = other RNA
taaaccctgttccgactactgc

SEQ ID NO: 17342 - RNA, 22 nt, synthetic construct
  misc_feature 1..22: note = HBV-targeting guide sequence portion
  source 1..22: mol_type = other RNA
taaaccttattatccagaacat

SEQ ID NO: 17343 - RNA, 22 nt, synthetic construct
  misc_feature 1..22: note = HBV-targeting guide sequence portion
  source 1..22: mol_type = other RNA
taaactgagccaagagaaacgg

SEQ ID NO: 17344 - RNA, 22 nt, synthetic construct
  misc_feature 1..22: note = HBV-targeting guide sequence portion
  source 1..22: mol_type = other RNA
taaagaatttggagctactgtg

SEQ ID NO: 17345 - RNA, 22 nt, synthetic construct
  misc_feature 1..22: note = HBV-targeting guide sequence portion
  source 1..22: mol_type = other RNA
taaagacaggtacagtagaaga

SEQ ID NO: 17346 - RNA, 22 nt, synthetic construct
  misc_feature 1..22: note = HBV-targeting guide sequence portion
  source 1..22: mol_type = other RNA
taaagactgggaggagttgggg

SEQ ID NO: 17347 - RNA, 22 nt, synthetic construct
  misc_feature 1..22: note = HBV-targeting guide sequence portion
  source 1..22: mol_type = other RNA
taaagagaggtgcgccccgtgg

SEQ ID NO: 17348 - RNA, 22 nt, synthetic construct
  misc_feature 1..22: note = HBV-targeting guide sequence portion
  source 1..22: mol_type = other RNA
taaagcaggataaccacattgt

SEQ ID NO: 17349 - RNA, 22 nt, synthetic construct
  misc_feature 1..22: note = HBV-targeting guide sequence portion
  source 1..22: mol_type = other RNA
taaagccacccaaggcacagct

SEQ ID NO: 17350 - RNA, 22 nt, synthetic construct
  misc_feature 1..22: note = HBV-targeting guide sequence portion
  source 1..22: mol_type = other RNA
taaagccccgtaaaatttccca

SEQ ID NO: 17351 - RNA, 22 nt, synthetic construct
  misc_feature 1..22: note = HBV-targeting guide sequence portion
  source 1..22: mol_type = other RNA
taaagggactcaagatgctgta

SEQ ID NO: 17352 - RNA, 22 nt, synthetic construct
  misc_feature 1..22: note = HBV-targeting guide sequence portion
  source 1..22: mol_type = other RNA
taaaggttcaggtattgtttac

SEQ ID NO: 17353 - RNA, 22 nt, synthetic construct
  misc_feature 1..22: note = HBV-targeting guide sequence portion
  source 1..22: mol_type = other RNA
taaagttcagacaactattgtg

SEQ ID NO: 17354 - RNA, 22 nt, synthetic construct
  misc_feature 1..22: note = HBV-targeting guide sequence portion
  source 1..22: mol_type = other RNA
taaatagtgtctagtttggaag

SEQ ID NO: 17355 - RNA, 22 nt, synthetic construct
  misc_feature 1..22: note = HBV-targeting guide sequence portion
  source 1..22: mol_type = other RNA
taaatgtacacccaaagacaaa

SEQ ID NO: 17356 - RNA, 22 nt, synthetic construct
  misc_feature 1..22: note = HBV-targeting guide sequence portion
  source 1..22: mol_type = other RNA
taaattagtacccacccaggta

SEQ ID NO: 17357 - RNA, 22 nt, synthetic construct
  misc_feature 1..22: note = HBV-targeting guide sequence portion
  source 1..22: mol_type = other RNA
taaattcaccaaatacttgccc

SEQ ID NO: 17358 - RNA, 22 nt, synthetic construct
  misc_feature 1..22: note = HBV-targeting guide sequence portion
  source 1..22: mol_type = other RNA
taaattggtctgcgcaccagca

SEQ ID NO: 17359 - RNA, 22 nt, synthetic construct
  misc_feature 1..22: note = HBV-targeting guide sequence portion
  source 1..22: mol_type = other RNA
taacaaaacaaagagatggggt

SEQ ID NO: 17360 - RNA, 22 nt, synthetic construct
  misc_feature 1..22: note = HBV-targeting guide sequence portion
  source 1..22: mol_type = other RNA
taacaacacaagtctccggaag

SEQ ID NO: 17361 - RNA, 22 nt, synthetic construct
  misc_feature 1..22: note = HBV-targeting guide sequence portion
  source 1..22: mol_type = other RNA
taacacgagcaggggtcctagg

SEQ ID NO: 17362 - RNA, 22 nt, synthetic construct
  misc_feature 1..22: note = HBV-targeting guide sequence portion
  source 1..22: mol_type = other RNA
taacagcggtataaagggactc

SEQ ID NO: 17363 - RNA, 22 nt, synthetic construct
  misc_feature 1..22: note = HBV-targeting guide sequence portion
  source 1..22: mol_type = other RNA
taacaggcctattgattggaaa

SEQ ID NO: 17364 - RNA, 22 nt, synthetic construct
  misc_feature 1..22: note = HBV-targeting guide sequence portion
  source 1..22: mol_type = other RNA
taacattgagatccccgagatt

SEQ ID NO: 17365 - RNA, 22 nt, synthetic construct
  misc_feature 1..22: note = HBV-targeting guide sequence portion
  source 1..22: mol_type = other RNA
taaccacattgtgtaaaagggg

SEQ ID NO: 17366 - RNA, 22 nt, synthetic construct
  misc_feature 1..22: note = HBV-targeting guide sequence portion
  source 1..22: mol_type = other RNA
taaccaggacaagttggaggac

SEQ ID NO: 17367 - RNA, 22 nt, synthetic construct
  misc_feature 1..22: note = HBV-targeting guide sequence portion
  source 1..22: mol_type = other RNA
taaccccatctctttgttttgt

SEQ ID NO: 17368 - RNA, 22 nt, synthetic construct
  misc_feature 1..22: note = HBV-targeting guide sequence portion
  source 1..22: mol_type = other RNA
taaccctcattggaaaacaccc

SEQ ID NO: 17369 - RNA, 22 nt, synthetic construct
  misc_feature 1..22: note = HBV-targeting guide sequence portion
  source 1..22: mol_type = other RNA
taaccgggagttttctgaaaca

SEQ ID NO: 17370 - RNA, 22 nt, synthetic construct
  misc_feature 1..22: note = HBV-targeting guide sequence portion
  source 1..22: mol_type = other RNA
taactagatgttctggataata

SEQ ID NO: 17371 - RNA, 22 nt, synthetic construct
  misc_feature 1..22: note = HBV-targeting guide sequence portion
  source 1..22: mol_type = other RNA
taactccacagtagctccaaat

SEQ ID NO: 17372 - RNA, 22 nt, synthetic construct
  misc_feature 1..22: note = HBV-targeting guide sequence portion
  source 1..22: mol_type = other RNA
taactgaaagccaaacagtggg

SEQ ID NO: 17373 - RNA, 22 nt, synthetic construct
  misc_feature 1..22: note = HBV-targeting guide sequence portion
  source 1..22: mol_type = other RNA
taactgactactaggtccctag

SEQ ID NO: 17374 - RNA, 22 nt, synthetic construct
  misc_feature 1..22: note = HBV-targeting guide sequence portion
  source 1..22: mol_type = other RNA
taactgtaagcgggcctacaaa

SEQ ID NO: 17375 - RNA, 22 nt, synthetic construct
  misc_feature 1..22: note = HBV-targeting guide sequence portion
  source 1..22: mol_type = other RNA
taagacaagaaatgtgaaacca

SEQ ID NO: 17376 - RNA, 22 nt, synthetic construct
  misc_feature 1..22: note = HBV-targeting guide sequence portion
  source 1..22: mol_type = other RNA
taagaccttgggcaagaattgg

SEQ ID NO: 17377 - RNA, 22 nt, synthetic construct
  misc_feature 1..22: note = HBV-targeting guide sequence portion
  source 1..22: mol_type = other RNA
taagagaataaccccatctctt

SEQ ID NO: 17378 - RNA, 22 nt, synthetic construct
  misc_feature 1..22: note = HBV-targeting guide sequence portion
  source 1..22: mol_type = other RNA
taagagagtgtcaacacatagc

SEQ ID NO: 17379 - RNA, 22 nt, synthetic construct
  misc_feature 1..22: note = HBV-targeting guide sequence portion
  source 1..22: mol_type = other RNA
taagaggactcttggactctct

SEQ ID NO: 17380 - RNA, 22 nt, synthetic construct
  misc_feature 1..22: note = HBV-targeting guide sequence portion
  source 1..22: mol_type = other RNA
taagcaggctttcactttttcg

SEQ ID NO: 17381 - RNA, 22 nt, synthetic construct
  misc_feature 1..22: note = HBV-targeting guide sequence portion
  source 1..22: mol_type = other RNA
taagcgggcctacaaactgttc

SEQ ID NO: 17382 - RNA, 22 nt, synthetic construct
  misc_feature 1..22: note = HBV-targeting guide sequence portion
  source 1..22: mol_type = other RNA
taagctggaggagtgcgaatcc

SEQ ID NO: 17383 - RNA, 22 nt, synthetic construct
  misc_feature 1..22: note = HBV-targeting guide sequence portion
  source 1..22: mol_type = other RNA
taagggtattaaaccttattat

SEQ ID NO: 17384 - RNA, 22 nt, synthetic construct
  misc_feature 1..22: note = HBV-targeting guide sequence portion
  source 1..22: mol_type = other RNA
taaggtgggaaattttacgggg

SEQ ID NO: 17385 - RNA, 22 nt, synthetic construct
  misc_feature 1..22: note = HBV-targeting guide sequence portion
  source 1..22: mol_type = other RNA
taaggtttaatacccttatcca

SEQ ID NO: 17386 - RNA, 22 nt, synthetic construct
  misc_feature 1..22: note = HBV-targeting guide sequence portion
  source 1..22: mol_type = other RNA
taagttggcgaaaaagtgaaag

SEQ ID NO: 17387 - RNA, 22 nt, synthetic construct
  misc_feature 1..22: note = HBV-targeting guide sequence portion
  source 1..22: mol_type = other RNA
taataaggtttaatacccttat

SEQ ID NO: 17388 - RNA, 22 nt, synthetic construct
  misc_feature 1..22: note = HBV-targeting guide sequence portion
  source 1..22: mol_type = other RNA
taatacccttatccaagggcaa

SEQ ID NO: 17389 - RNA, 22 nt, synthetic construct
  misc_feature 1..22: note = HBV-targeting guide sequence portion
  source 1..22: mol_type = other RNA
taatatacatctacaccaagat

SEQ ID NO: 17390 - RNA, 22 nt, synthetic construct
  misc_feature 1..22: note = HBV-targeting guide sequence portion
  source 1..22: mol_type = other RNA
taatatcttggtgtagatgtat

SEQ ID NO: 17391 - RNA, 22 nt, synthetic construct
  misc_feature 1..22: note = HBV-targeting guide sequence portion
  source 1..22: mol_type = other RNA
taatcaatttcaaccgtctttt

SEQ ID NO: 17392 - RNA, 22 nt, synthetic construct
  misc_feature 1..22: note = HBV-targeting guide sequence portion
  source 1..22: mol_type = other RNA
taatcatctcttgttcatgtcc

SEQ ID NO: 17393 - RNA, 22 nt, synthetic construct
  misc_feature 1..22: note = HBV-targeting guide sequence portion
  source 1..22: mol_type = other RNA
taatcattacttccaaactaga

SEQ ID NO: 17394 - RNA, 22 nt, synthetic construct
  misc_feature 1..22: note = HBV-targeting guide sequence portion
  source 1..22: mol_type = other RNA
taatctaatctcctcccccaac

SEQ ID NO: 17395 - RNA, 22 nt, synthetic construct
  misc_feature 1..22: note = HBV-targeting guide sequence portion
  source 1..22: mol_type = other RNA
taatctcctcccccaactcctc

SEQ ID NO: 17396 - RNA, 22 nt, synthetic construct
  misc_feature 1..22: note = HBV-targeting guide sequence portion
  source 1..22: mol_type = other RNA
taatgactctagctacctgggt

SEQ ID NO: 17397 - RNA, 22 nt, synthetic construct
  misc_feature 1..22: note = HBV-targeting guide sequence portion
  source 1..22: mol_type = other RNA
taatgagaaaagacggttgaaa

SEQ ID NO: 17398 - RNA, 22 nt, synthetic construct
  misc_feature 1..22: note = HBV-targeting guide sequence portion
  source 1..22: mol_type = other RNA
taatgatctttgtactaggagg

SEQ ID NO: 17399 - RNA, 22 nt, synthetic construct
  misc_feature 1..22: note = HBV-targeting guide sequence portion
  source 1..22: mol_type = other RNA
taatgattaactagatgttctg

SEQ ID NO: 17400 - RNA, 22 nt, synthetic construct
  misc_feature 1..22: note = HBV-targeting guide sequence portion
  source 1..22: mol_type = other RNA
taatgcaaaccttgccagcaaa

SEQ ID NO: 17401 - RNA, 22 nt, synthetic construct
  misc_feature 1..22: note = HBV-targeting guide sequence portion
  source 1..22: mol_type = other RNA
taatgcccttgtatgcatgtat

SEQ ID NO: 17402 - RNA, 22 nt, synthetic construct
  misc_feature 1..22: note = HBV-targeting guide sequence portion
  source 1..22: mol_type = other RNA
taattccaggatcatcaaccac

SEQ ID NO: 17403 - RNA, 22 nt, synthetic construct
  misc_feature 1..22: note = HBV-targeting guide sequence portion
  source 1..22: mol_type = other RNA
taatttagaagatcaagcatct

SEQ ID NO: 17404 - RNA, 22 nt, synthetic construct
  misc_feature 1..22: note = HBV-targeting guide sequence portion
  source 1..22: mol_type = other RNA
taatttcatgggctatgtcatt

SEQ ID NO: 17405 - RNA, 22 nt, synthetic construct
  misc_feature 1..22: note = HBV-targeting guide sequence portion
  source 1..22: mol_type = other RNA
tacaaaaccttcggatggaaac

SEQ ID NO: 17406 - RNA, 22 nt, synthetic construct
  misc_feature 1..22: note = HBV-targeting guide sequence portion
  source 1..22: mol_type = other RNA
tacaaactgttcacattttttg

SEQ ID NO: 17407 - RNA, 22 nt, synthetic construct
  misc_feature 1..22: note = HBV-targeting guide sequence portion
  source 1..22: mol_type = other RNA
tacaaagatcattaatctaatc

SEQ ID NO: 17408 - RNA, 22 nt, synthetic construct
  misc_feature 1..22: note = HBV-targeting guide sequence portion
  source 1..22: mol_type = other RNA
tacaaggcctttctgtgtaaac

SEQ ID NO: 17409 - RNA, 22 nt, synthetic construct
  misc_feature 1..22: note = HBV-targeting guide sequence portion
  source 1..22: mol_type = other RNA
tacaagggcattaaagcaggat

SEQ ID NO: 17410 - RNA, 22 nt, synthetic construct
  misc_feature 1..22: note = HBV-targeting guide sequence portion
  source 1..22: mol_type = other RNA
tacacaaaatcaaagaatgttt

SEQ ID NO: 17411 - RNA, 22 nt, synthetic construct
  misc_feature 1..22: note = HBV-targeting guide sequence portion
  source 1..22: mol_type = other RNA
tacacaatgtggttatcctgct

SEQ ID NO: 17412 - RNA, 22 nt, synthetic construct
  misc_feature 1..22: note = HBV-targeting guide sequence portion
  source 1..22: mol_type = other RNA
tacacactctatggaaggcggg

SEQ ID NO: 17413 - RNA, 22 nt, synthetic construct
  misc_feature 1..22: note = HBV-targeting guide sequence portion
  source 1..22: mol_type = other RNA
tacacagaaaggccttgtaagt

SEQ ID NO: 17414 - RNA, 22 nt, synthetic construct
  misc_feature 1..22: note = HBV-targeting guide sequence portion
  source 1..22: mol_type = other RNA
tacaccaagatattatcaaaaa

SEQ ID NO: 17415 - RNA, 22 nt, synthetic construct
  misc_feature 1..22: note = HBV-targeting guide sequence portion
  source 1..22: mol_type = other RNA
tacacccaaagacaaaagaaaa

SEQ ID NO: 17416 - RNA, 22 nt, synthetic construct
  misc_feature 1..22: note = HBV-targeting guide sequence portion
  source 1..22: mol_type = other RNA
tacagacttggcccccaatacc

SEQ ID NO: 17417 - RNA, 22 nt, synthetic construct
  misc_feature 1..22: note = HBV-targeting guide sequence portion
  source 1..22: mol_type = other RNA
tacagagctgcggcggtatcta

SEQ ID NO: 17418 - RNA, 22 nt, synthetic construct
  misc_feature 1..22: note = HBV-targeting guide sequence portion
  source 1..22: mol_type = other RNA
tacagcaacaggagggatacat

SEQ ID NO: 17419 - RNA, 22 nt, synthetic construct
  misc_feature 1..22: note = HBV-targeting guide sequence portion
  source 1..22: mol_type = other RNA
tacagcatcttgagtcccttta

SEQ ID NO: 17420 - RNA, 22 nt, synthetic construct
  misc_feature 1..22: note = HBV-targeting guide sequence portion
  source 1..22: mol_type = other RNA
tacagcatggggcagaatcttt

SEQ ID NO: 17421 - RNA, 22 nt, synthetic construct
  misc_feature 1..22: note = HBV-targeting guide sequence portion
  source 1..22: mol_type = other RNA
tacagcctcctagtacaaagat

SEQ ID NO: 17422 - RNA, 22 nt, synthetic construct
  misc_feature 1..22: note = HBV-targeting guide sequence portion
  source 1..22: mol_type = other RNA
tacaggcctctcactctgggat

SEQ ID NO: 17423 - RNA, 22 nt, synthetic construct
  misc_feature 1..22: note = HBV-targeting guide sequence portion
  source 1..22: mol_type = other RNA
tacaggcggggttttccttgtt

SEQ ID NO: 17424 - RNA, 22 nt, synthetic construct
  misc_feature 1..22: note = HBV-targeting guide sequence portion
  source 1..22: mol_type = other RNA
tacaggtgcagtttccatccga

SEQ ID NO: 17425 - RNA, 22 nt, synthetic construct
  misc_feature 1..22: note = HBV-targeting guide sequence portion
  source 1..22: mol_type = other RNA
tacagtagaagaataaagcccc

SEQ ID NO: 17426 - RNA, 22 nt, synthetic construct
  misc_feature 1..22: note = HBV-targeting guide sequence portion
  source 1..22: mol_type = other RNA
tacagttaatgagaaaagacgg

SEQ ID NO: 17427 - RNA, 22 nt, synthetic construct
  misc_feature 1..22: note = HBV-targeting guide sequence portion
  source 1..22: mol_type = other RNA
tacataagaggactcttggact

SEQ ID NO: 17428 - RNA, 22 nt, synthetic construct
  misc_feature 1..22: note = HBV-targeting guide sequence portion
  source 1..22: mol_type = other RNA
tacatagaggttccttgagcag

SEQ ID NO: 17429 - RNA, 22 nt, synthetic construct
  misc_feature 1..22: note = HBV-targeting guide sequence portion
  source 1..22: mol_type = other RNA
tacatcgttcccatggctgcta

SEQ ID NO: 17430 - RNA, 22 nt, synthetic construct
  misc_feature 1..22: note = HBV-targeting guide sequence portion
  source 1..22: mol_type = other RNA
tacatctacaccaagatattat

SEQ ID NO: 17431 - RNA, 22 nt, synthetic construct
  misc_feature 1..22: note = HBV-targeting guide sequence portion
  source 1..22: mol_type = other RNA
tacatgcatacaagggcattaa

SEQ ID NO: 17432 - RNA, 22 nt, synthetic construct
  misc_feature 1..22: note = HBV-targeting guide sequence portion
  source 1..22: mol_type = other RNA
tacatttaaaccctaacaaaac

SEQ ID NO: 17433 - RNA, 22 nt, synthetic construct
  misc_feature 1..22: note = HBV-targeting guide sequence portion
  source 1..22: mol_type = other RNA
taccaatcgccagtcaggacgg

SEQ ID NO: 17434 - RNA, 22 nt, synthetic construct
  misc_feature 1..22: note = HBV-targeting guide sequence portion
  source 1..22: mol_type = other RNA
taccaattttcttttgtctttg

SEQ ID NO: 17435 - RNA, 22 nt, synthetic construct
  misc_feature 1..22: note = HBV-targeting guide sequence portion
  source 1..22: mol_type = other RNA
taccacatcatccatataactg

SEQ ID NO: 17436 - RNA, 22 nt, synthetic construct
  misc_feature 1..22: note = HBV-targeting guide sequence portion
  source 1..22: mol_type = other RNA
tacccacccaggtagctagagt

SEQ ID NO: 17437 - RNA, 22 nt, synthetic construct
  misc_feature 1..22: note = HBV-targeting guide sequence portion
  source 1..22: mol_type = other RNA
taccccgctgtctccacctctg

SEQ ID NO: 17438 - RNA, 22 nt, synthetic construct
  misc_feature 1..22: note = HBV-targeting guide sequence portion
  source 1..22: mol_type = other RNA
taccccgttgccaggcaacggc

SEQ ID NO: 17439 - RNA, 22 nt, synthetic construct
  misc_feature 1..22: note = HBV-targeting guide sequence portion
  source 1..22: mol_type = other RNA
tacccttatccaagggcaagta

SEQ ID NO: 17440 - RNA, 22 nt, synthetic construct
  misc_feature 1..22: note = HBV-targeting guide sequence portion
  source 1..22: mol_type = other RNA
taccgcagagtctagactcgtg

SEQ ID NO: 17441 - RNA, 22 nt, synthetic construct
  misc_feature 1..22: note = HBV-targeting guide sequence portion
  source 1..22: mol_type = other RNA
taccgccgcagctctgtatcgg

SEQ ID NO: 17442 - RNA, 22 nt, synthetic construct
  misc_feature 1..22: note = HBV-targeting guide sequence portion
  source 1..22: mol_type = other RNA
taccgctgttaccaattttctt

SEQ ID NO: 17443 - RNA, 22 nt, synthetic construct
  misc_feature 1..22: note = HBV-targeting guide sequence portion
  source 1..22: mol_type = other RNA
taccgtgtgtcttggccaaaat

SEQ ID NO: 17444 - RNA, 22 nt, synthetic construct
  misc_feature 1..22: note = HBV-targeting guide sequence portion
  source 1..22: mol_type = other RNA
tacctgaacctttaccccgttg

SEQ ID NO: 17445 - RNA, 22 nt, synthetic construct
  misc_feature 1..22: note = HBV-targeting guide sequence portion
  source 1..22: mol_type = other RNA
tacctgggtgggtactaattta

SEQ ID NO: 17446 - RNA, 22 nt, synthetic construct
  misc_feature 1..22: note = HBV-targeting guide sequence portion
  source 1..22: mol_type = other RNA
tacctgtctttaaccctcattg

SEQ ID NO: 17447 - RNA, 22 nt, synthetic construct
  misc_feature 1..22: note = HBV-targeting guide sequence portion
  source 1..22: mol_type = other RNA
taccttgatagtccagaagaac

SEQ ID NO: 17448 - RNA, 22 nt, synthetic construct
  misc_feature 1..22: note = HBV-targeting guide sequence portion
  source 1..22: mol_type = other RNA
taccttgttggcgtctggccag

SEQ ID NO: 17449 - RNA, 22 nt, synthetic construct
  misc_feature 1..22: note = HBV-targeting guide sequence portion
  source 1..22: mol_type = other RNA
tacgaaccactgaacaaatggc

SEQ ID NO: 17450 - RNA, 22 nt, synthetic construct
  misc_feature 1..22: note = HBV-targeting guide sequence portion
  source 1..22: mol_type = other RNA
tacgagatcttctagataccgc

SEQ ID NO: 17451 - RNA, 22 nt, synthetic construct
  misc_feature 1..22: note = HBV-targeting guide sequence portion
  source 1..22: mol_type = other RNA
tacgcggactccccgtctgtgc

SEQ ID NO: 17452 - RNA, 22 nt, synthetic construct
  misc_feature 1..22: note = HBV-targeting guide sequence portion
  source 1..22: mol_type = other RNA
tacggaaggaaagaagtcagaa

SEQ ID NO: 17453 - RNA, 22 nt, synthetic construct
  misc_feature 1..22: note = HBV-targeting guide sequence portion
  source 1..22: mol_type = other RNA
tacggggctttattcttctact

SEQ ID NO: 17454 - RNA, 22 nt, synthetic construct
  misc_feature 1..22: note = HBV-targeting guide sequence portion
  source 1..22: mol_type = other RNA
tacgtcccgtcggcgctgaatc

SEQ ID NO: 17455 - RNA, 22 nt, synthetic construct
  misc_feature 1..22: note = HBV-targeting guide sequence portion
  source 1..22: mol_type = other RNA
tactaacattgagatccccgag

SEQ ID NO: 17456 - RNA, 22 nt, synthetic construct
  misc_feature 1..22: note = HBV-targeting guide sequence portion
  source 1..22: mol_type = other RNA
tactaatttagaagatcaagca

SEQ ID NO: 17457 - RNA, 22 nt, synthetic construct
  misc_feature 1..22: note = HBV-targeting guide sequence portion
  source 1..22: mol_type = other RNA
tactaggaggctgtaggcataa

SEQ ID NO: 17458 - RNA, 22 nt, synthetic construct
  misc_feature 1..22: note = HBV-targeting guide sequence portion
  source 1..22: mol_type = other RNA
tactaggtccctagatgcttga

SEQ ID NO: 17459 - RNA, 22 nt, synthetic construct
  misc_feature 1..22: note = HBV-targeting guide sequence portion
  source 1..22: mol_type = other RNA
tactagtgccatttgttcagtg

SEQ ID NO: 17460 - RNA, 22 nt, synthetic construct
  misc_feature 1..22: note = HBV-targeting guide sequence portion
  source 1..22: mol_type = other RNA
tactctaggaccgtttctcttc

SEQ ID NO: 17461 - RNA, 22 nt, synthetic construct
  misc_feature 1..22: note = HBV-targeting guide sequence portion
  source 1..22: mol_type = other RNA
tactctcgtttttgccttctga

SEQ ID NO: 17462 - RNA, 22 nt, synthetic construct
  misc_feature 1..22: note = HBV-targeting guide sequence portion
  source 1..22: mol_type = other RNA
tactgcactcaggcaagcaatt

SEQ ID NO: 17463 - RNA, 22 nt, synthetic construct
  misc_feature 1..22: note = HBV-targeting guide sequence portion
  source 1..22: mol_type = other RNA
tactgcctctcacatatcgtca

SEQ ID NO: 17464 - RNA, 22 nt, synthetic construct
  misc_feature 1..22: note = HBV-targeting guide sequence portion
  source 1..22: mol_type = other RNA
tactgcggaactcctagccgct

SEQ ID NO: 17465 - RNA, 22 nt, synthetic construct
  misc_feature 1..22: note = HBV-targeting guide sequence portion
  source 1..22: mol_type = other RNA
tactgtacctgtctttaaccct

SEQ ID NO: 17466 - RNA, 22 nt, synthetic construct
  misc_feature 1..22: note = HBV-targeting guide sequence portion
  source 1..22: mol_type = other RNA
tactgtggagttactctcgttt

SEQ ID NO: 17467 - RNA, 22 nt, synthetic construct
  misc_feature 1..22: note = HBV-targeting guide sequence portion
  source 1..22: mol_type = other RNA
tactgttcaagcctccaagctg

SEQ ID NO: 17468 - RNA, 22 nt, synthetic construct
  misc_feature 1..22: note = HBV-targeting guide sequence portion
  source 1..22: mol_type = other RNA
tactgttcctgaactggagcca

SEQ ID NO: 17469 - RNA, 22 nt, synthetic construct
  misc_feature 1..22: note = HBV-targeting guide sequence portion
  source 1..22: mol_type = other RNA
tacttcaaagactgtttgttta

SEQ ID NO: 17470 - RNA, 22 nt, synthetic construct
  misc_feature 1..22: note = HBV-targeting guide sequence portion
  source 1..22: mol_type = other RNA
tacttccaaactagacactatt

SEQ ID NO: 17471 - RNA, 22 nt, synthetic construct
  misc_feature 1..22: note = HBV-targeting guide sequence portion
  source 1..22: mol_type = other RNA
tacttgcccttggataagggta

SEQ ID NO: 17472 - RNA, 22 nt, synthetic construct
  misc_feature 1..22: note = HBV-targeting guide sequence portion
  source 1..22: mol_type = other RNA
tacttttggaagagaaacggtc

SEQ ID NO: 17473 - RNA, 22 nt, synthetic construct
  misc_feature 1..22: note = HBV-targeting guide sequence portion
  source 1..22: mol_type = other RNA
tagaaaattgagagaagtccac

SEQ ID NO: 17474 - RNA, 22 nt, synthetic construct
  misc_feature 1..22: note = HBV-targeting guide sequence portion
  source 1..22: mol_type = other RNA
tagaagaagaactccctcgcct

SEQ ID NO: 17475 - RNA, 22 nt, synthetic construct
  misc_feature 1..22: note = HBV-targeting guide sequence portion
  source 1..22: mol_type = other RNA
tagaagaataaagccccgtaaa

SEQ ID NO: 17476 - RNA, 22 nt, synthetic construct
  misc_feature 1..22: note = HBV-targeting guide sequence portion
  source 1..22: mol_type = other RNA
tagaagatcaagcatctaggga

SEQ ID NO: 17477 - RNA, 22 nt, synthetic construct
  misc_feature 1..22: note = HBV-targeting guide sequence portion
  source 1..22: mol_type = other RNA
tagaagatctcgtacggaagga

SEQ ID NO: 17478 - RNA, 22 nt, synthetic construct
  misc_feature 1..22: note = HBV-targeting guide sequence portion
  source 1..22: mol_type = other RNA
tagacactatttacacactcta

SEQ ID NO: 17479 - RNA, 22 nt, synthetic construct
  misc_feature 1..22: note = HBV-targeting guide sequence portion
  source 1..22: mol_type = other RNA
tagaccaccaaatgcccctatc

SEQ ID NO: 17480 - RNA, 22 nt, synthetic construct
  misc_feature 1..22: note = HBV-targeting guide sequence portion
  source 1..22: mol_type = other RNA
tagacgacgaggcaggtcccct

SEQ ID NO: 17481 - RNA, 22 nt, synthetic construct
  misc_feature 1..22: note = HBV-targeting guide sequence portion
  source 1..22: mol_type = other RNA
tagactcgtggtggacttctct

SEQ ID NO: 17482 - RNA, 22 nt, synthetic construct
  misc_feature 1..22: note = HBV-targeting guide sequence portion
  source 1..22: mol_type = other RNA
tagactctgcggtattgtgagg

SEQ ID NO: 17483 - RNA, 22 nt, synthetic construct
  misc_feature 1..22: note = HBV-targeting guide sequence portion
  source 1..22: mol_type = other RNA
tagaggacagacgggaaacata

SEQ ID NO: 17484 - RNA, 22 nt, synthetic construct
  misc_feature 1..22: note = HBV-targeting guide sequence portion
  source 1..22: mol_type = other RNA
tagaggcaggaggcggatttgc

SEQ ID NO: 17485 - RNA, 22 nt, synthetic construct
  misc_feature 1..22: note = HBV-targeting guide sequence portion
  source 1..22: mol_type = other RNA
tagaggttccttgagcaggagt

SEQ ID NO: 17486 - RNA, 22 nt, synthetic construct
  misc_feature 1..22: note = HBV-targeting guide sequence portion
  source 1..22: mol_type = other RNA
tagagtatttggtgtcttttgg

SEQ ID NO: 17487 - RNA, 22 nt, synthetic construct
  misc_feature 1..22: note = HBV-targeting guide sequence portion
  source 1..22: mol_type = other RNA
tagagtcattagttctccccag

SEQ ID NO: 17488 - RNA, 22 nt, synthetic construct
  misc_feature 1..22: note = HBV-targeting guide sequence portion
  source 1..22: mol_type = other RNA
tagagtgtgtaaatagtgtcta

SEQ ID NO: 17489 - RNA, 22 nt, synthetic construct
  misc_feature 1..22: note = HBV-targeting guide sequence portion
  source 1..22: mol_type = other RNA
tagataccgccgcagctctgta

SEQ ID NO: 17490 - RNA, 22 nt, synthetic construct
  misc_feature 1..22: note = HBV-targeting guide sequence portion
  source 1..22: mol_type = other RNA
tagatgcttgatcttctaaatt

SEQ ID NO: 17491 - RNA, 22 nt, synthetic construct
  misc_feature 1..22: note = HBV-targeting guide sequence portion
  source 1..22: mol_type = other RNA
tagatgtatattaggaaaagag

SEQ ID NO: 17492 - RNA, 22 nt, synthetic construct
  misc_feature 1..22: note = HBV-targeting guide sequence portion
  source 1..22: mol_type = other RNA
tagatgttctggataataaggt

SEQ ID NO: 17493 - RNA, 22 nt, synthetic construct
  misc_feature 1..22: note = HBV-targeting guide sequence portion
  source 1..22: mol_type = other RNA
tagattaatgatctttgtacta

SEQ ID NO: 17494 - RNA, 22 nt, synthetic construct
  misc_feature 1..22: note = HBV-targeting guide sequence portion
  source 1..22: mol_type = other RNA
tagattgaatacatgcatacaa

SEQ ID NO: 17495 - RNA, 22 nt, synthetic construct
  misc_feature 1..22: note = HBV-targeting guide sequence portion
  source 1..22: mol_type = other RNA
tagcagcaggatgaagaggaag

SEQ ID NO: 17496 - RNA, 22 nt, synthetic construct
  misc_feature 1..22: note = HBV-targeting guide sequence portion
  source 1..22: mol_type = other RNA
tagcagccatgggaacgatgta

SEQ ID NO: 17497 - RNA, 22 nt, synthetic construct
  misc_feature 1..22: note = HBV-targeting guide sequence portion
  source 1..22: mol_type = other RNA
tagcaggcataatcaatttcaa

SEQ ID NO: 17498 - RNA, 22 nt, synthetic construct
  misc_feature 1..22: note = HBV-targeting guide sequence portion
  source 1..22: mol_type = other RNA
tagcccatgaaattaagagaat

SEQ ID NO: 17499 - RNA, 22 nt, synthetic construct
  misc_feature 1..22: note = HBV-targeting guide sequence portion
  source 1..22: mol_type = other RNA
tagcccgaatgctccagctcct

SEQ ID NO: 17500 - RNA, 22 nt, synthetic construct
  misc_feature 1..22: note = HBV-targeting guide sequence portion
  source 1..22: mol_type = other RNA
tagccgcttgttttgctcgcag

SEQ ID NO: 17501 - RNA, 22 nt, synthetic construct
  misc_feature 1..22: note = HBV-targeting guide sequence portion
  source 1..22: mol_type = other RNA
tagcgcctcattctgtgggtca

SEQ ID NO: 17502 - RNA, 22 nt, synthetic construct
  misc_feature 1..22: note = HBV-targeting guide sequence portion
  source 1..22: mol_type = other RNA
tagctacctgggtgggtactaa

SEQ ID NO: 17503 - RNA, 22 nt, synthetic construct
  misc_feature 1..22: note = HBV-targeting guide sequence portion
  source 1..22: mol_type = other RNA
tagctagagtcattagttctcc

SEQ ID NO: 17504 - RNA, 22 nt, synthetic construct
  misc_feature 1..22: note = HBV-targeting guide sequence portion
  source 1..22: mol_type = other RNA
tagctccaaattctttatatgg

SEQ ID NO: 17505 - RNA, 22 nt, synthetic construct
  misc_feature 1..22: note = HBV-targeting guide sequence portion
  source 1..22: mol_type = other RNA
tagctcttgttcccaagaatat

SEQ ID NO: 17506 - RNA, 22 nt, synthetic construct
  misc_feature 1..22: note = HBV-targeting guide sequence portion
  source 1..22: mol_type = other RNA
taggaaaagagggtgttttcca

SEQ ID NO: 17507 - RNA, 22 nt, synthetic construct
  misc_feature 1..22: note = HBV-targeting guide sequence portion
  source 1..22: mol_type = other RNA
taggaatcctgatgtgatgttc

SEQ ID NO: 17508 - RNA, 22 nt, synthetic construct
  misc_feature 1..22: note = HBV-targeting guide sequence portion
  source 1..22: mol_type = other RNA
taggaattttccgaaagcccag

SEQ ID NO: 17509 - RNA, 22 nt, synthetic construct
  misc_feature 1..22: note = HBV-targeting guide sequence portion
  source 1..22: mol_type = other RNA
taggacatgaacaagagatgat

SEQ ID NO: 17510 - RNA, 22 nt, synthetic construct
  misc_feature 1..22: note = HBV-targeting guide sequence portion
  source 1..22: mol_type = other RNA
taggacccctgctcgtgttaca

SEQ ID NO: 17511 - RNA, 22 nt, synthetic construct
  misc_feature 1..22: note = HBV-targeting guide sequence portion
  source 1..22: mol_type = other RNA
taggaccgtttctcttccaaaa

SEQ ID NO: 17512 - RNA, 22 nt, synthetic construct
  misc_feature 1..22: note = HBV-targeting guide sequence portion
  source 1..22: mol_type = other RNA
taggagctggagcattcgggct

SEQ ID NO: 17513 - RNA, 22 nt, synthetic construct
  misc_feature 1..22: note = HBV-targeting guide sequence portion
  source 1..22: mol_type = other RNA
taggaggctgtaggcataaatt

SEQ ID NO: 17514 - RNA, 22 nt, synthetic construct
  misc_feature 1..22: note = HBV-targeting guide sequence portion
  source 1..22: mol_type = other RNA
taggagttccgcagtatggatc

SEQ ID NO: 17515 - RNA, 22 nt, synthetic construct
  misc_feature 1..22: note = HBV-targeting guide sequence portion
  source 1..22: mol_type = other RNA
taggataaaacctagcaggcat

SEQ ID NO: 17516 - RNA, 22 nt, synthetic construct
  misc_feature 1..22: note = HBV-targeting guide sequence portion
  source 1..22: mol_type = other RNA
taggataggggcatttggtggt

SEQ ID NO: 17517 - RNA, 22 nt, synthetic construct
  misc_feature 1..22: note = HBV-targeting guide sequence portion
  source 1..22: mol_type = other RNA
taggcagaggtgaaaaagttgc

SEQ ID NO: 17518 - RNA, 22 nt, synthetic construct
  misc_feature 1..22: note = HBV-targeting guide sequence portion
  source 1..22: mol_type = other RNA
taggcataaattggtctgcgca

SEQ ID NO: 17519 - RNA, 22 nt, synthetic construct
  misc_feature 1..22: note = HBV-targeting guide sequence portion
  source 1..22: mol_type = other RNA
taggccatcagcgcatgcgtgg

SEQ ID NO: 17520 - RNA, 22 nt, synthetic construct
  misc_feature 1..22: note = HBV-targeting guide sequence portion
  source 1..22: mol_type = other RNA
taggcccatatgagtgttgaca

SEQ ID NO: 17521 - RNA, 22 nt, synthetic construct
  misc_feature 1..22: note = HBV-targeting guide sequence portion
  source 1..22: mol_type = other RNA
taggcccgcttacagttaatga

SEQ ID NO: 17522 - RNA, 22 nt, synthetic construct
  misc_feature 1..22: note = HBV-targeting guide sequence portion
  source 1..22: mol_type = other RNA
taggcctgttaaccgggagttt

SEQ ID NO: 17523 - RNA, 22 nt, synthetic construct
  misc_feature 1..22: note = HBV-targeting guide sequence portion
  source 1..22: mol_type = other RNA
taggctgccgtcctgactggcg

SEQ ID NO: 17524 - RNA, 22 nt, synthetic construct
  misc_feature 1..22: note = HBV-targeting guide sequence portion
  source 1..22: mol_type = other RNA
taggctgtgctgccaactggat

SEQ ID NO: 17525 - RNA, 22 nt, synthetic construct
  misc_feature 1..22: note = HBV-targeting guide sequence portion
  source 1..22: mol_type = other RNA
tagggacctagtagtcagttat

SEQ ID NO: 17526 - RNA, 22 nt, synthetic construct
  misc_feature 1..22: note = HBV-targeting guide sequence portion
  source 1..22: mol_type = other RNA
tagggcatggacattgacccat

SEQ ID NO: 17527 - RNA, 22 nt, synthetic construct
  misc_feature 1..22: note = HBV-targeting guide sequence portion
  source 1..22: mol_type = other RNA
tagggctttcccccactgtttg

SEQ ID NO: 17528 - RNA, 22 nt, synthetic construct
  misc_feature 1..22: note = HBV-targeting guide sequence portion
  source 1..22: mol_type = other RNA
taggggacctgcctcgtcgtct

SEQ ID NO: 17529 - RNA, 22 nt, synthetic construct
  misc_feature 1..22: note = HBV-targeting guide sequence portion
  source 1..22: mol_type = other RNA
taggggcatttggtggtctata

SEQ ID NO: 17530 - RNA, 22 nt, synthetic construct
  misc_feature 1..22: note = HBV-targeting guide sequence portion
  source 1..22: mol_type = other RNA
tagggggaactaccgtgtgtct

SEQ ID NO: 17531 - RNA, 22 nt, synthetic construct
  misc_feature 1..22: note = HBV-targeting guide sequence portion
  source 1..22: mol_type = other RNA
tagggttcaccccaccgcacgg

SEQ ID NO: 17532 - RNA, 22 nt, synthetic construct
  misc_feature 1..22: note = HBV-targeting guide sequence portion
  source 1..22: mol_type = other RNA
tagggtttaaatgtacacccaa

SEQ ID NO: 17533 - RNA, 22 nt, synthetic construct
  misc_feature 1..22: note = HBV-targeting guide sequence portion
  source 1..22: mol_type = other RNA
taggtccctagatgcttgatct

SEQ ID NO: 17534 - RNA, 22 nt, synthetic construct
  misc_feature 1..22: note = HBV-targeting guide sequence portion
  source 1..22: mol_type = other RNA
taggttttatcctaaattcacc

SEQ ID NO: 17535 - RNA, 22 nt, synthetic construct
  misc_feature 1..22: note = HBV-targeting guide sequence portion
  source 1..22: mol_type = other RNA
tagtaaactgagccaagagaaa

SEQ ID NO: 17536 - RNA, 22 nt, synthetic construct
  misc_feature 1..22: note = HBV-targeting guide sequence portion
  source 1..22: mol_type = other RNA
tagtacaaagatcattaatcta

SEQ ID NO: 17537 - RNA, 22 nt, synthetic construct
  misc_feature 1..22: note = HBV-targeting guide sequence portion
  source 1..22: mol_type = other RNA
tagtacccacccaggtagctag

SEQ ID NO: 17538 - RNA, 22 nt, synthetic construct
  misc_feature 1..22: note = HBV-targeting guide sequence portion
  source 1..22: mol_type = other RNA
tagtagtcagttatgtcaacac

SEQ ID NO: 17539 - RNA, 22 nt, synthetic construct
  misc_feature 1..22: note = HBV-targeting guide sequence portion
  source 1..22: mol_type = other RNA
tagtatcccttggactcataag

SEQ ID NO: 17540 - RNA, 22 nt, synthetic construct
  misc_feature 1..22: note = HBV-targeting guide sequence portion
  source 1..22: mol_type = other RNA
tagtcagttatgtcaacactca

SEQ ID NO: 17541 - RNA, 22 nt, synthetic construct
  misc_feature 1..22: note = HBV-targeting guide sequence portion
  source 1..22: mol_type = other RNA
tagtccagaagaaccaacaaga

SEQ ID NO: 17542 - RNA, 22 nt, synthetic construct
  misc_feature 1..22: note = HBV-targeting guide sequence portion
  source 1..22: mol_type = other RNA
tagtcggaacagggtttactgt

SEQ ID NO: 17543 - RNA, 22 nt, synthetic construct
  misc_feature 1..22: note = HBV-targeting guide sequence portion
  source 1..22: mol_type = other RNA
tagtgccatttgttcagtggtt

SEQ ID NO: 17544 - RNA, 22 nt, synthetic construct
  misc_feature 1..22: note = HBV-targeting guide sequence portion
  source 1..22: mol_type = other RNA
tagtgtctagtttggaagtaat

SEQ ID NO: 17545 - RNA, 22 nt, synthetic construct
  misc_feature 1..22: note = HBV-targeting guide sequence portion
  source 1..22: mol_type = other RNA
tagttaatcattacttccaaac

SEQ ID NO: 17546 - RNA, 22 nt, synthetic construct
  misc_feature 1..22: note = HBV-targeting guide sequence portion
  source 1..22: mol_type = other RNA
tagttccccctagaaaattgag

SEQ ID NO: 17547 - RNA, 22 nt, synthetic construct
  misc_feature 1..22: note = HBV-targeting guide sequence portion
  source 1..22: mol_type = other RNA
tagttctccccagcaaagaatt

SEQ ID NO: 17548 - RNA, 22 nt, synthetic construct
  misc_feature 1..22: note = HBV-targeting guide sequence portion
  source 1..22: mol_type = other RNA
tagttgtctgaactttaggccc

SEQ ID NO: 17549 - RNA, 22 nt, synthetic construct
  misc_feature 1..22: note = HBV-targeting guide sequence portion
  source 1..22: mol_type = other RNA
tagtttggaagtaatgattaac

SEQ ID NO: 17550 - RNA, 22 nt, synthetic construct
  misc_feature 1..22: note = HBV-targeting guide sequence portion
  source 1..22: mol_type = other RNA
tataaaacacccgccttccata

SEQ ID NO: 17551 - RNA, 22 nt, synthetic construct
  misc_feature 1..22: note = HBV-targeting guide sequence portion
  source 1..22: mol_type = other RNA
tataaagaatttggagctactg

SEQ ID NO: 17552 - RNA, 22 nt, synthetic construct
  misc_feature 1..22: note = HBV-targeting guide sequence portion
  source 1..22: mol_type = other RNA
tataaagggactcaagatgctg

SEQ ID NO: 17553 - RNA, 22 nt, synthetic construct
  misc_feature 1..22: note = HBV-targeting guide sequence portion
  source 1..22: mol_type = other RNA
tataactgaaagccaaacagtg

SEQ ID NO: 17554 - RNA, 22 nt, synthetic construct
  misc_feature 1..22: note = HBV-targeting guide sequence portion
  source 1..22: mol_type = other RNA
tataagagagtgtcaacacata

SEQ ID NO: 17555 - RNA, 22 nt, synthetic construct
  misc_feature 1..22: note = HBV-targeting guide sequence portion
  source 1..22: mol_type = other RNA
tataagctggaggagtgcgaat

SEQ ID NO: 17556 - RNA, 22 nt, synthetic construct
  misc_feature 1..22: note = HBV-targeting guide sequence portion
  source 1..22: mol_type = other RNA
tatacatcgttcccatggctgc

SEQ ID NO: 17557 - RNA, 22 nt, synthetic construct
  misc_feature 1..22: note = HBV-targeting guide sequence portion
  source 1..22: mol_type = other RNA
tatacatctacaccaagatatt

SEQ ID NO: 17558 - RNA, 22 nt, synthetic construct
  misc_feature 1..22: note = HBV-targeting guide sequence portion
  source 1..22: mol_type = other RNA
tataccgctgttaccaattttc

SEQ ID NO: 17559 - RNA, 22 nt, synthetic construct
  misc_feature 1..22: note = HBV-targeting guide sequence portion
  source 1..22: mol_type = other RNA
tatagaccaccaaatgccccta

SEQ ID NO: 17560 - RNA, 22 nt, synthetic construct
  misc_feature 1..22: note = HBV-targeting guide sequence portion
  source 1..22: mol_type = other RNA
tatataaaacacccgccttcca

SEQ ID NO: 17561 - RNA, 22 nt, synthetic construct
  misc_feature 1..22: note = HBV-targeting guide sequence portion
  source 1..22: mol_type = other RNA
tatataagagagtgtcaacaca

SEQ ID NO: 17562 - RNA, 22 nt, synthetic construct
  misc_feature 1..22: note = HBV-targeting guide sequence portion
  source 1..22: mol_type = other RNA
tatatggatgatgtggtattgg

SEQ ID NO: 17563 - RNA, 22 nt, synthetic construct
  misc_feature 1..22: note = HBV-targeting guide sequence portion
  source 1..22: mol_type = other RNA
tatatgggtcaatgtccatgcc

SEQ ID NO: 17564 - RNA, 22 nt, synthetic construct
  misc_feature 1..22: note = HBV-targeting guide sequence portion
  source 1..22: mol_type = other RNA
tatattaggaaaagagggtgtt

SEQ ID NO: 17565 - RNA, 22 nt, synthetic construct
  misc_feature 1..22: note = HBV-targeting guide sequence portion
  source 1..22: mol_type = other RNA
tatatttgcgggagaggacaac

SEQ ID NO: 17566 - RNA, 22 nt, synthetic construct
  misc_feature 1..22: note = HBV-targeting guide sequence portion
  source 1..22: mol_type = other RNA
tatcaaaaaatgtgaacagttt

SEQ ID NO: 17567 - RNA, 22 nt, synthetic construct
  misc_feature 1..22: note = HBV-targeting guide sequence portion
  source 1..22: mol_type = other RNA
tatcaacacttccggagacttg

SEQ ID NO: 17568 - RNA, 22 nt, synthetic construct
  misc_feature 1..22: note = HBV-targeting guide sequence portion
  source 1..22: mol_type = other RNA
tatcaaggtatgtttcccgtct

SEQ ID NO: 17569 - RNA, 22 nt, synthetic construct
  misc_feature 1..22: note = HBV-targeting guide sequence portion
  source 1..22: mol_type = other RNA
tatcatcttcctcttcatcctg

SEQ ID NO: 17570 - RNA, 22 nt, synthetic construct
  misc_feature 1..22: note = HBV-targeting guide sequence portion
  source 1..22: mol_type = other RNA
tatccaagggcaagtatttggt

SEQ ID NO: 17571 - RNA, 22 nt, synthetic construct
  misc_feature 1..22: note = HBV-targeting guide sequence portion
  source 1..22: mol_type = other RNA
tatccagaacatctagttaatc

SEQ ID NO: 17572 - RNA, 22 nt, synthetic construct
  misc_feature 1..22: note = HBV-targeting guide sequence portion
  source 1..22: mol_type = other RNA
tatccctcctgttgctgtacaa

SEQ ID NO: 17573 - RNA, 22 nt, synthetic construct
  misc_feature 1..22: note = HBV-targeting guide sequence portion
  source 1..22: mol_type = other RNA
tatcccttggactcataaggtg

SEQ ID NO: 17574 - RNA, 22 nt, synthetic construct
  misc_feature 1..22: note = HBV-targeting guide sequence portion
  source 1..22: mol_type = other RNA
tatcctaaattcaccaaatact

SEQ ID NO: 17575 - RNA, 22 nt, synthetic construct
  misc_feature 1..22: note = HBV-targeting guide sequence portion
  source 1..22: mol_type = other RNA
tatcctatcaacacttccggag

SEQ ID NO: 17576 - RNA, 22 nt, synthetic construct
  misc_feature 1..22: note = HBV-targeting guide sequence portion
  source 1..22: mol_type = other RNA
tatcctgctttaatgcccttgt

SEQ ID NO: 17577 - RNA, 22 nt, synthetic construct
  misc_feature 1..22: note = HBV-targeting guide sequence portion
  source 1..22: mol_type = other RNA
tatcgctggatgtgtctgcggc

SEQ ID NO: 17578 - RNA, 22 nt, synthetic construct
  misc_feature 1..22: note = HBV-targeting guide sequence portion
  source 1..22: mol_type = other RNA
tatcgggatgccttggagtctc

SEQ ID NO: 17579 - RNA, 22 nt, synthetic construct
  misc_feature 1..22: note = HBV-targeting guide sequence portion
  source 1..22: mol_type = other RNA
tatcgtcaatcttctcgaggat

SEQ ID NO: 17580 - RNA, 22 nt, synthetic construct
  misc_feature 1..22: note = HBV-targeting guide sequence portion
  source 1..22: mol_type = other RNA
tatctagaagatctcgtacgga

SEQ ID NO: 17581 - RNA, 22 nt, synthetic construct
  misc_feature 1..22: note = HBV-targeting guide sequence portion
  source 1..22: mol_type = other RNA
tatctccctgctggtggctcca

SEQ ID NO: 17582 - RNA, 22 nt, synthetic construct
  misc_feature 1..22: note = HBV-targeting guide sequence portion
  source 1..22: mol_type = other RNA
tatcttggtgtagatgtatatt

SEQ ID NO: 17583 - RNA, 22 nt, synthetic construct
  misc_feature 1..22: note = HBV-targeting guide sequence portion
  source 1..22: mol_type = other RNA
tatgaccaagccccaaccagtg

SEQ ID NO: 17584 - RNA, 22 nt, synthetic construct
  misc_feature 1..22: note = HBV-targeting guide sequence portion
  source 1..22: mol_type = other RNA
tatgagtccaagggatactaac

SEQ ID NO: 17585 - RNA, 22 nt, synthetic construct
  misc_feature 1..22: note = HBV-targeting guide sequence portion
  source 1..22: mol_type = other RNA
tatgagtgttgacataactgac

SEQ ID NO: 17586 - RNA, 22 nt, synthetic construct
  misc_feature 1..22: note = HBV-targeting guide sequence portion
  source 1..22: mol_type = other RNA
tatgatgtgattttgtggcaat

SEQ ID NO: 17587 - RNA, 22 nt, synthetic construct
  misc_feature 1..22: note = HBV-targeting guide sequence portion
  source 1..22: mol_type = other RNA
tatgcatgtattcaatctaagc

SEQ ID NO: 17588 - RNA, 22 nt, synthetic construct
  misc_feature 1..22: note = HBV-targeting guide sequence portion
  source 1..22: mol_type = other RNA
tatgccctgagcctgagggctc

SEQ ID NO: 17589 - RNA, 22 nt, synthetic construct
  misc_feature 1..22: note = HBV-targeting guide sequence portion
  source 1..22: mol_type = other RNA
tatgcctacagcctcctagtac

SEQ ID NO: 17590 - RNA, 22 nt, synthetic construct
  misc_feature 1..22: note = HBV-targeting guide sequence portion
  source 1..22: mol_type = other RNA
tatgcctcaaggtcggtcgttg

SEQ ID NO: 17591 - RNA, 22 nt, synthetic construct
  misc_feature 1..22: note = HBV-targeting guide sequence portion
  source 1..22: mol_type = other RNA
tatgcctcatcttcttgttggt

SEQ ID NO: 17592 - RNA, 22 nt, synthetic construct
  misc_feature 1..22: note = HBV-targeting guide sequence portion
  source 1..22: mol_type = other RNA
tatgcctgctaggttttatcct

SEQ ID NO: 17593 - RNA, 22 nt, synthetic construct
  misc_feature 1..22: note = HBV-targeting guide sequence portion
  source 1..22: mol_type = other RNA
tatggaaggcgggtgttttata

SEQ ID NO: 17594 - RNA, 22 nt, synthetic construct
  misc_feature 1..22: note = HBV-targeting guide sequence portion
  source 1..22: mol_type = other RNA
tatggatcggcagaggagccgg

SEQ ID NO: 17595 - RNA, 22 nt, synthetic construct
  misc_feature 1..22: note = HBV-targeting guide sequence portion
  source 1..22: mol_type = other RNA
tatggatgatgtggtattgggg

SEQ ID NO: 17596 - RNA, 22 nt, synthetic construct
  misc_feature 1..22: note = HBV-targeting guide sequence portion
  source 1..22: mol_type = other RNA
tatgggagtgggcctcagcccg

SEQ ID NO: 17597 - RNA, 22 nt, synthetic construct
  misc_feature 1..22: note = HBV-targeting guide sequence portion
  source 1..22: mol_type = other RNA
tatgggcctaaagttcagacaa

SEQ ID NO: 17598 - RNA, 22 nt, synthetic construct
  misc_feature 1..22: note = HBV-targeting guide sequence portion
  source 1..22: mol_type = other RNA
tatgggtcaatgtccatgccct

SEQ ID NO: 17599 - RNA, 22 nt, synthetic construct
  misc_feature 1..22: note = HBV-targeting guide sequence portion
  source 1..22: mol_type = other RNA
tatggtgacccacagaatgagg

SEQ ID NO: 17600 - RNA, 22 nt, synthetic construct
  misc_feature 1..22: note = HBV-targeting guide sequence portion
  source 1..22: mol_type = other RNA
tatggtgaggtgaacaatgctc

SEQ ID NO: 17601 - RNA, 22 nt, synthetic construct
  misc_feature 1..22: note = HBV-targeting guide sequence portion
  source 1..22: mol_type = other RNA
tatgtaagaccttgggcaagaa

SEQ ID NO: 17602 - RNA, 22 nt, synthetic construct
  misc_feature 1..22: note = HBV-targeting guide sequence portion
  source 1..22: mol_type = other RNA
tatgtatccctcctgttgctgt

SEQ ID NO: 17603 - RNA, 22 nt, synthetic construct
  misc_feature 1..22: note = HBV-targeting guide sequence portion
  source 1..22: mol_type = other RNA
tatgtcaacactcatatgggcc

SEQ ID NO: 17604 - RNA, 22 nt, synthetic construct
  misc_feature 1..22: note = HBV-targeting guide sequence portion
  source 1..22: mol_type = other RNA
tatgtcattgattgttggggat

SEQ ID NO: 17605 - RNA, 22 nt, synthetic construct
  misc_feature 1..22: note = HBV-targeting guide sequence portion
  source 1..22: mol_type = other RNA
tatgtgagaggcagtagtcgga

SEQ ID NO: 17606 - RNA, 22 nt, synthetic construct
  misc_feature 1..22: note = HBV-targeting guide sequence portion
  source 1..22: mol_type = other RNA
tatgtgttgacactctcttata

SEQ ID NO: 17607 - RNA, 22 nt, synthetic construct
  misc_feature 1..22: note = HBV-targeting guide sequence portion
  source 1..22: mol_type = other RNA
tatgtttcccgtctgtcctcta

SEQ ID NO: 17608 - RNA, 22 nt, synthetic construct
  misc_feature 1..22: note = HBV-targeting guide sequence portion
  source 1..22: mol_type = other RNA
tattaaaccttattatccagaa

SEQ ID NO: 17609 - RNA, 22 nt, synthetic construct
  misc_feature 1..22: note = HBV-targeting guide sequence portion
  source 1..22: mol_type = other RNA
tattaggaaaagagggtgtttt

SEQ ID NO: 17610 - RNA, 22 nt, synthetic construct
  misc_feature 1..22: note = HBV-targeting guide sequence portion
  source 1..22: mol_type = other RNA
tattatcaaaaaatgtgaacag

SEQ ID NO: 17611 - RNA, 22 nt, synthetic construct
  misc_feature 1..22: note = HBV-targeting guide sequence portion
  source 1..22: mol_type = other RNA
tattatccagaacatctagtta

SEQ ID NO: 17612 - RNA, 22 nt, synthetic construct
  misc_feature 1..22: note = HBV-targeting guide sequence portion
  source 1..22: mol_type = other RNA
tattcaatctaagcaggctttc

SEQ ID NO: 17613 - RNA, 22 nt, synthetic construct
  misc_feature 1..22: note = HBV-targeting guide sequence portion
  source 1..22: mol_type = other RNA
tattcccatcccatcatcctgg

SEQ ID NO: 17614 - RNA, 22 nt, synthetic construct
  misc_feature 1..22: note = HBV-targeting guide sequence portion
  source 1..22: mol_type = other RNA
tattctcttaatttcatgggct

SEQ ID NO: 17615 - RNA, 22 nt, synthetic construct
  misc_feature 1..22: note = HBV-targeting guide sequence portion
  source 1..22: mol_type = other RNA
tattcttctactgtacctgtct

SEQ ID NO: 17616 - RNA, 22 nt, synthetic construct
  misc_feature 1..22: note = HBV-targeting guide sequence portion
  source 1..22: mol_type = other RNA
tattcttgggaacaagagctac

SEQ ID NO: 17617 - RNA, 22 nt, synthetic construct
  misc_feature 1..22: note = HBV-targeting guide sequence portion
  source 1..22: mol_type = other RNA
tattgattggaaagtgtgtcaa

SEQ ID NO: 17618 - RNA, 22 nt, synthetic construct
  misc_feature 1..22: note = HBV-targeting guide sequence portion
  source 1..22: mol_type = other RNA
tattgggggccaagtctgtaca

SEQ ID NO: 17619 - RNA, 22 nt, synthetic construct
  misc_feature 1..22: note = HBV-targeting guide sequence portion
  source 1..22: mol_type = other RNA
tattgtgaggattcttgtcaac

SEQ ID NO: 17620 - RNA, 22 nt, synthetic construct
  misc_feature 1..22: note = HBV-targeting guide sequence portion
  source 1..22: mol_type = other RNA
tattgtggtttcacatttcttg

SEQ ID NO: 17621 - RNA, 22 nt, synthetic construct
  misc_feature 1..22: note = HBV-targeting guide sequence portion
  source 1..22: mol_type = other RNA
tattgtttacacagaaaggcct

SEQ ID NO: 17622 - RNA, 22 nt, synthetic construct
  misc_feature 1..22: note = HBV-targeting guide sequence portion
  source 1..22: mol_type = other RNA
tatttacacactctatggaagg

SEQ ID NO: 17623 - RNA, 22 nt, synthetic construct
  misc_feature 1..22: note = HBV-targeting guide sequence portion
  source 1..22: mol_type = other RNA
tatttgcgggagaggacaacag

SEQ ID NO: 17624 - RNA, 22 nt, synthetic construct
  misc_feature 1..22: note = HBV-targeting guide sequence portion
  source 1..22: mol_type = other RNA
tatttggtgaatttaggataaa

SEQ ID NO: 17625 - RNA, 22 nt, synthetic construct
  misc_feature 1..22: note = HBV-targeting guide sequence portion
  source 1..22: mol_type = other RNA
tatttggtgtcttttggagtgt

SEQ ID NO: 17626 - RNA, 22 nt, synthetic construct
  misc_feature 1..22: note = HBV-targeting guide sequence portion
  source 1..22: mol_type = other RNA
tcaaaaaatgtgaacagtttgt

SEQ ID NO: 17627 - RNA, 22 nt, synthetic construct
  misc_feature 1..22: note = HBV-targeting guide sequence portion
  source 1..22: mol_type = other RNA
tcaaagaatgtttcagaaaact

SEQ ID NO: 17628 - RNA, 22 nt, synthetic construct
  misc_feature 1..22: note = HBV-targeting guide sequence portion
  source 1..22: mol_type = other RNA
tcaaagactgtttgtttaaaga

SEQ ID NO: 17629 - RNA, 22 nt, synthetic construct
  misc_feature 1..22: note = HBV-targeting guide sequence portion
  source 1..22: mol_type = other RNA
tcaacaaggaaaaccccgcctg

SEQ ID NO: 17630 - RNA, 22 nt, synthetic construct
  misc_feature 1..22: note = HBV-targeting guide sequence portion
  source 1..22: mol_type = other RNA
tcaacacatagcgcctcattct

SEQ ID NO: 17631 - RNA, 22 nt, synthetic construct
  misc_feature 1..22: note = HBV-targeting guide sequence portion
  source 1..22: mol_type = other RNA
tcaacactcatatgggcctaaa

SEQ ID NO: 17632 - RNA, 22 nt, synthetic construct
  misc_feature 1..22: note = HBV-targeting guide sequence portion
  source 1..22: mol_type = other RNA
tcaacacttccggagacttgtg

SEQ ID NO: 17633 - RNA, 22 nt, synthetic construct
  misc_feature 1..22: note = HBV-targeting guide sequence portion
  source 1..22: mol_type = other RNA
tcaaccaccagcacgggaccct

SEQ ID NO: 17634 - RNA, 22 nt, synthetic construct
  misc_feature 1..22: note = HBV-targeting guide sequence portion
  source 1..22: mol_type = other RNA
tcaaccgtcttttctcattaac

SEQ ID NO: 17635 - RNA, 22 nt, synthetic construct
  misc_feature 1..22: note = HBV-targeting guide sequence portion
  source 1..22: mol_type = other RNA
tcaacgaattgtgggtcttctg

SEQ ID NO: 17636 - RNA, 22 nt, synthetic construct
  misc_feature 1..22: note = HBV-targeting guide sequence portion
  source 1..22: mol_type = other RNA
tcaacgaccgaccttgaggcat

SEQ ID NO: 17637 - RNA, 22 nt, synthetic construct
  misc_feature 1..22: note = HBV-targeting guide sequence portion
  source 1..22: mol_type = other RNA
tcaagatgctgtacagacttgg

SEQ ID NO: 17638 - RNA, 22 nt, synthetic construct
  misc_feature 1..22: note = HBV-targeting guide sequence portion
  source 1..22: mol_type = other RNA
tcaagcatctagggacctagta

SEQ ID NO: 17639 - RNA, 22 nt, synthetic construct
  misc_feature 1..22: note = HBV-targeting guide sequence portion
  source 1..22: mol_type = other RNA
tcaagcctccaagctgtgcctt

SEQ ID NO: 17640 - RNA, 22 nt, synthetic construct
  misc_feature 1..22: note = HBV-targeting guide sequence portion
  source 1..22: mol_type = other RNA
tcaaggaacctctatgtatccc

SEQ ID NO: 17641 - RNA, 22 nt, synthetic construct
  misc_feature 1..22: note = HBV-targeting guide sequence portion
  source 1..22: mol_type = other RNA
tcaaggtatgtttcccgtctgt

SEQ ID NO: 17642 - RNA, 22 nt, synthetic construct
  misc_feature 1..22: note = HBV-targeting guide sequence portion
  source 1..22: mol_type = other RNA
tcaaggtcggtcgttgacattg

SEQ ID NO: 17643 - RNA, 22 nt, synthetic construct
  misc_feature 1..22: note = HBV-targeting guide sequence portion
  source 1..22: mol_type = other RNA
tcaataggcctgttaaccggga

SEQ ID NO: 17644 - RNA, 22 nt, synthetic construct
  misc_feature 1..22: note = HBV-targeting guide sequence portion
  source 1..22: mol_type = other RNA
tcaatcccaacaaggatccctg

SEQ ID NO: 17645 - RNA, 22 nt, synthetic construct
  misc_feature 1..22: note = HBV-targeting guide sequence portion
  source 1..22: mol_type = other RNA
tcaatcgccgcgtcgcagaaga

SEQ ID NO: 17646 - RNA, 22 nt, synthetic construct
  misc_feature 1..22: note = HBV-targeting guide sequence portion
  source 1..22: mol_type = other RNA
tcaatctaagcaggctttcact

SEQ ID NO: 17647 - RNA, 22 nt, synthetic construct
  misc_feature 1..22: note = HBV-targeting guide sequence portion
  source 1..22: mol_type = other RNA
tcaatctcggggatctcaatgt

SEQ ID NO: 17648 - RNA, 22 nt, synthetic construct
  misc_feature 1..22: note = HBV-targeting guide sequence portion
  source 1..22: mol_type = other RNA
tcaatcttctcgaggattgggg

SEQ ID NO: 17649 - RNA, 22 nt, synthetic construct
  misc_feature 1..22: note = HBV-targeting guide sequence portion
  source 1..22: mol_type = other RNA
tcaatgacatagcccatgaaat

SEQ ID NO: 17650 - RNA, 22 nt, synthetic construct
  misc_feature 1..22: note = HBV-targeting guide sequence portion
  source 1..22: mol_type = other RNA
tcaatgtccatgccctaaagcc

SEQ ID NO: 17651 - RNA, 22 nt, synthetic construct
  misc_feature 1..22: note = HBV-targeting guide sequence portion
  source 1..22: mol_type = other RNA
tcaatgttagtatcccttggac

SEQ ID NO: 17652 - RNA, 22 nt, synthetic construct
  misc_feature 1..22: note = HBV-targeting guide sequence portion
  source 1..22: mol_type = other RNA
tcaatttcaaccgtcttttctc

SEQ ID NO: 17653 - RNA, 22 nt, synthetic construct
  misc_feature 1..22: note = HBV-targeting guide sequence portion
  source 1..22: mol_type = other RNA
tcaattttctagggggaactac

SEQ ID NO: 17654 - RNA, 22 nt, synthetic construct
  misc_feature 1..22: note = HBV-targeting guide sequence portion
  source 1..22: mol_type = other RNA
tcacaataccgcagagtctaga

SEQ ID NO: 17655 - RNA, 22 nt, synthetic construct
  misc_feature 1..22: note = HBV-targeting guide sequence portion
  source 1..22: mol_type = other RNA
tcacatatcgtcaatcttctcg

SEQ ID NO: 17656 - RNA, 22 nt, synthetic construct
  misc_feature 1..22: note = HBV-targeting guide sequence portion
  source 1..22: mol_type = other RNA
tcacatcaggattcctaggacc

SEQ ID NO: 17657 - RNA, 22 nt, synthetic construct
  misc_feature 1..22: note = HBV-targeting guide sequence portion
  source 1..22: mol_type = other RNA
tcacatcatacacaaaatcaaa

SEQ ID NO: 17658 - RNA, 22 nt, synthetic construct
  misc_feature 1..22: note = HBV-targeting guide sequence portion
  source 1..22: mol_type = other RNA
tcacatttcttgtcttactttt

SEQ ID NO: 17659 - RNA, 22 nt, synthetic construct
  misc_feature 1..22: note = HBV-targeting guide sequence portion
  source 1..22: mol_type = other RNA
tcacattttttgataatatctt

SEQ ID NO: 17660 - RNA, 22 nt, synthetic construct
  misc_feature 1..22: note = HBV-targeting guide sequence portion
  source 1..22: mol_type = other RNA
tcaccaaatacttgcccttgga

SEQ ID NO: 17661 - RNA, 22 nt, synthetic construct
  misc_feature 1..22: note = HBV-targeting guide sequence portion
  source 1..22: mol_type = other RNA
tcaccaacctcctgtcctccaa

SEQ ID NO: 17662 - RNA, 22 nt, synthetic construct
  misc_feature 1..22: note = HBV-targeting guide sequence portion
  source 1..22: mol_type = other RNA
tcaccatactgcactcaggcaa

SEQ ID NO: 17663 - RNA, 22 nt, synthetic construct
  misc_feature 1..22: note = HBV-targeting guide sequence portion
  source 1..22: mol_type = other RNA
tcaccatattcttgggaacaag

SEQ ID NO: 17664 - RNA, 22 nt, synthetic construct
  misc_feature 1..22: note = HBV-targeting guide sequence portion
  source 1..22: mol_type = other RNA
tcaccccaccgcacggaggcct

SEQ ID NO: 17665 - RNA, 22 nt, synthetic construct
  misc_feature 1..22: note = HBV-targeting guide sequence portion
  source 1..22: mol_type = other RNA
tcacctcaccatactgcactca

SEQ ID NO: 17666 - RNA, 22 nt, synthetic construct
  misc_feature 1..22: note = HBV-targeting guide sequence portion
  source 1..22: mol_type = other RNA
tcacctctgcacgtcgcatgga

SEQ ID NO: 17667 - RNA, 22 nt, synthetic construct
  misc_feature 1..22: note = HBV-targeting guide sequence portion
  source 1..22: mol_type = other RNA
tcacctctgcctaatcatctct

SEQ ID NO: 17668 - RNA, 22 nt, synthetic construct
  misc_feature 1..22: note = HBV-targeting guide sequence portion
  source 1..22: mol_type = other RNA
tcacggtggtctccatgcgacg

SEQ ID NO: 17669 - RNA, 22 nt, synthetic construct
  misc_feature 1..22: note = HBV-targeting guide sequence portion
  source 1..22: mol_type = other RNA
tcactcaccaacctcctgtcct

SEQ ID NO: 17670 - RNA, 22 nt, synthetic construct
  misc_feature 1..22: note = HBV-targeting guide sequence portion
  source 1..22: mol_type = other RNA
tcactctgggatcttgcagagt

SEQ ID NO: 17671 - RNA, 22 nt, synthetic construct
  misc_feature 1..22: note = HBV-targeting guide sequence portion
  source 1..22: mol_type = other RNA
tcactttttcgccaacttacaa

SEQ ID NO: 17672 - RNA, 22 nt, synthetic construct
  misc_feature 1..22: note = HBV-targeting guide sequence portion
  source 1..22: mol_type = other RNA
tcagaaaactcccggttaacag

SEQ ID NO: 17673 - RNA, 22 nt, synthetic construct
  misc_feature 1..22: note = HBV-targeting guide sequence portion
  source 1..22: mol_type = other RNA
tcagaaggcaaaaacgagagta

SEQ ID NO: 17674 - RNA, 22 nt, synthetic construct
  misc_feature 1..22: note = HBV-targeting guide sequence portion
  source 1..22: mol_type = other RNA
tcagacaactattgtggtttca

SEQ ID NO: 17675 - RNA, 22 nt, synthetic construct
  misc_feature 1..22: note = HBV-targeting guide sequence portion
  source 1..22: mol_type = other RNA
tcagagcaaactccaacaatcc

SEQ ID NO: 17676 - RNA, 22 nt, synthetic construct
  misc_feature 1..22: note = HBV-targeting guide sequence portion
  source 1..22: mol_type = other RNA
tcagaggtggagacagcggggt

SEQ ID NO: 17677 - RNA, 22 nt, synthetic construct
  misc_feature 1..22: note = HBV-targeting guide sequence portion
  source 1..22: mol_type = other RNA
tcagcaaacacttggcacagac

SEQ ID NO: 17678 - RNA, 22 nt, synthetic construct
  misc_feature 1..22: note = HBV-targeting guide sequence portion
  source 1..22: mol_type = other RNA
tcagcccgtttctcttggctca

SEQ ID NO: 17679 - RNA, 22 nt, synthetic construct
  misc_feature 1..22: note = HBV-targeting guide sequence portion
  source 1..22: mol_type = other RNA
tcagcgcagggtccccaatcct

SEQ ID NO: 17680 - RNA, 22 nt, synthetic construct
  misc_feature 1..22: note = HBV-targeting guide sequence portion
  source 1..22: mol_type = other RNA
tcagcgcatgcgtggaaccttt

SEQ ID NO: 17681 - RNA, 22 nt, synthetic construct
  misc_feature 1..22: note = HBV-targeting guide sequence portion
  source 1..22: mol_type = other RNA
tcagcgccgacgggacgtaaac

SEQ ID NO: 17682 - RNA, 22 nt, synthetic construct
  misc_feature 1..22: note = HBV-targeting guide sequence portion
  source 1..22: mol_type = other RNA
tcaggaacagtaaaccctgttc

SEQ ID NO: 17683 - RNA, 22 nt, synthetic construct
  misc_feature 1..22: note = HBV-targeting guide sequence portion
  source 1..22: mol_type = other RNA
tcaggacggcagcctaccccgc

SEQ ID NO: 17684 - RNA, 22 nt, synthetic construct
  misc_feature 1..22: note = HBV-targeting guide sequence portion
  source 1..22: mol_type = other RNA
tcaggagactccaaggcatccc

SEQ ID NO: 17685 - RNA, 22 nt, synthetic construct
  misc_feature 1..22: note = HBV-targeting guide sequence portion
  source 1..22: mol_type = other RNA
tcaggattcctaggacccctgc

SEQ ID NO: 17686 - RNA, 22 nt, synthetic construct
  misc_feature 1..22: note = HBV-targeting guide sequence portion
  source 1..22: mol_type = other RNA
tcaggcaagcaattctttgctg

SEQ ID NO: 17687 - RNA, 22 nt, synthetic construct
  misc_feature 1..22: note = HBV-targeting guide sequence portion
  source 1..22: mol_type = other RNA
tcaggctcagggcataatgcaa

SEQ ID NO: 17688 - RNA, 22 nt, synthetic construct
  misc_feature 1..22: note = HBV-targeting guide sequence portion
  source 1..22: mol_type = other RNA
tcagggcataatgcaaaccttg

SEQ ID NO: 17689 - RNA, 22 nt, synthetic construct
  misc_feature 1..22: note = HBV-targeting guide sequence portion
  source 1..22: mol_type = other RNA
tcaggtattgtttacacagaaa

SEQ ID NO: 17690 - RNA, 22 nt, synthetic construct
  misc_feature 1..22: note = HBV-targeting guide sequence portion
  source 1..22: mol_type = other RNA
tcagtcccgagaatgtttgctc

SEQ ID NO: 17691 - RNA, 22 nt, synthetic construct
  misc_feature 1..22: note = HBV-targeting guide sequence portion
  source 1..22: mol_type = other RNA
tcagtggttcgtagggctttcc

SEQ ID NO: 17692 - RNA, 22 nt, synthetic construct
  misc_feature 1..22: note = HBV-targeting guide sequence portion
  source 1..22: mol_type = other RNA
tcagttatatggatgatgtggt

SEQ ID NO: 17693 - RNA, 22 nt, synthetic construct
  misc_feature 1..22: note = HBV-targeting guide sequence portion
  source 1..22: mol_type = other RNA
tcagttatgtcaacactcatat

SEQ ID NO: 17694 - RNA, 22 nt, synthetic construct
  misc_feature 1..22: note = HBV-targeting guide sequence portion
  source 1..22: mol_type = other RNA
tcagtttactagtgccatttgt

SEQ ID NO: 17695 - RNA, 22 nt, synthetic construct
  misc_feature 1..22: note = HBV-targeting guide sequence portion
  source 1..22: mol_type = other RNA
tcataaggtgggaaattttacg

SEQ ID NO: 17696 - RNA, 22 nt, synthetic construct
  misc_feature 1..22: note = HBV-targeting guide sequence portion
  source 1..22: mol_type = other RNA
tcatacacaaaatcaaagaatg

SEQ ID NO: 17697 - RNA, 22 nt, synthetic construct
  misc_feature 1..22: note = HBV-targeting guide sequence portion
  source 1..22: mol_type = other RNA
tcataggccatcagcgcatgcg

SEQ ID NO: 17698 - RNA, 22 nt, synthetic construct
  misc_feature 1..22: note = HBV-targeting guide sequence portion
  source 1..22: mol_type = other RNA
tcatatgggcctaaagttcaga

SEQ ID NO: 17699 - RNA, 22 nt, synthetic construct
  misc_feature 1..22: note = HBV-targeting guide sequence portion
  source 1..22: mol_type = other RNA
tcatcaaccaccagcacgggac

SEQ ID NO: 17700 - RNA, 22 nt, synthetic construct
  misc_feature 1..22: note = HBV-targeting guide sequence portion
  source 1..22: mol_type = other RNA
tcatccatataactgaaagcca

SEQ ID NO: 17701 - RNA, 22 nt, synthetic construct
  misc_feature 1..22: note = HBV-targeting guide sequence portion
  source 1..22: mol_type = other RNA
tcatcctgctgctatgcctcat

SEQ ID NO: 17702 - RNA, 22 nt, synthetic construct
  misc_feature 1..22: note = HBV-targeting guide sequence portion
  source 1..22: mol_type = other RNA
tcatcctgggctttcggaaaat

SEQ ID NO: 17703 - RNA, 22 nt, synthetic construct
  misc_feature 1..22: note = HBV-targeting guide sequence portion
  source 1..22: mol_type = other RNA
tcatctcttgttcatgtcctac

SEQ ID NO: 17704 - RNA, 22 nt, synthetic construct
  misc_feature 1..22: note = HBV-targeting guide sequence portion
  source 1..22: mol_type = other RNA
tcatctgccggaccgtgtgcac

SEQ ID NO: 17705 - RNA, 22 nt, synthetic construct
  misc_feature 1..22: note = HBV-targeting guide sequence portion
  source 1..22: mol_type = other RNA
tcatcttcctcttcatcctgct

SEQ ID NO: 17706 - RNA, 22 nt, synthetic construct
  misc_feature 1..22: note = HBV-targeting guide sequence portion
  source 1..22: mol_type = other RNA
tcatcttcttgttggttcttct

SEQ ID NO: 17707 - RNA, 22 nt, synthetic construct
  misc_feature 1..22: note = HBV-targeting guide sequence portion
  source 1..22: mol_type = other RNA
tcatgggctatgtcattgattg

SEQ ID NO: 17708 - RNA, 22 nt, synthetic construct
  misc_feature 1..22: note = HBV-targeting guide sequence portion
  source 1..22: mol_type = other RNA
tcatgtcctactgttcaagcct

SEQ ID NO: 17709 - RNA, 22 nt, synthetic construct
  misc_feature 1..22: note = HBV-targeting guide sequence portion
  source 1..22: mol_type = other RNA
tcattaactgtaagcgggccta

SEQ ID NO: 17710 - RNA, 22 nt, synthetic construct
  misc_feature 1..22: note = HBV-targeting guide sequence portion
  source 1..22: mol_type = other RNA
tcattaatctaatctcctcccc

SEQ ID NO: 17711 - RNA, 22 nt, synthetic construct
  misc_feature 1..22: note = HBV-targeting guide sequence portion
  source 1..22: mol_type = other RNA
tcattacttccaaactagacac

SEQ ID NO: 17712 - RNA, 22 nt, synthetic construct
  misc_feature 1..22: note = HBV-targeting guide sequence portion
  source 1..22: mol_type = other RNA
tcattagttctccccagcaaag

SEQ ID NO: 17713 - RNA, 22 nt, synthetic construct
  misc_feature 1..22: note = HBV-targeting guide sequence portion
  source 1..22: mol_type = other RNA
tcattctgtgggtcaccatatt

SEQ ID NO: 17714 - RNA, 22 nt, synthetic construct
  misc_feature 1..22: note = HBV-targeting guide sequence portion
  source 1..22: mol_type = other RNA
tcattgattgttggggatcatt

SEQ ID NO: 17715 - RNA, 22 nt, synthetic construct
  misc_feature 1..22: note = HBV-targeting guide sequence portion
  source 1..22: mol_type = other RNA
tcattgccacaaaatcacatca

SEQ ID NO: 17716 - RNA, 22 nt, synthetic construct
  misc_feature 1..22: note = HBV-targeting guide sequence portion
  source 1..22: mol_type = other RNA
tcattggaaaacaccctctttt

SEQ ID NO: 17717 - RNA, 22 nt, synthetic construct
  misc_feature 1..22: note = HBV-targeting guide sequence portion
  source 1..22: mol_type = other RNA
tccaaaagacaccaaatactct

SEQ ID NO: 17718 - RNA, 22 nt, synthetic construct
  misc_feature 1..22: note = HBV-targeting guide sequence portion
  source 1..22: mol_type = other RNA
tccaaaagtaagacaagaaatg

SEQ ID NO: 17719 - RNA, 22 nt, synthetic construct
  misc_feature 1..22: note = HBV-targeting guide sequence portion
  source 1..22: mol_type = other RNA
tccaaactagacactatttaca

SEQ ID NO: 17720 - RNA, 22 nt, synthetic construct
  misc_feature 1..22: note = HBV-targeting guide sequence portion
  source 1..22: mol_type = other RNA
tccaaattctttatatgggtca

SEQ ID NO: 17721 - RNA, 22 nt, synthetic construct
  misc_feature 1..22: note = HBV-targeting guide sequence portion
  source 1..22: mol_type = other RNA
tccaacaatccagattgggact

SEQ ID NO: 17722 - RNA, 22 nt, synthetic construct
  misc_feature 1..22: note = HBV-targeting guide sequence portion
  source 1..22: mol_type = other RNA
tccaactggtggtcgggaaaga

SEQ ID NO: 17723 - RNA, 22 nt, synthetic construct
  misc_feature 1..22: note = HBV-targeting guide sequence portion
  source 1..22: mol_type = other RNA
tccaacttgtcctggttatcgc

SEQ ID NO: 17724 - RNA, 22 nt, synthetic construct
  misc_feature 1..22: note = HBV-targeting guide sequence portion
  source 1..22: mol_type = other RNA
tccaagagtcctcttatgtaag

SEQ ID NO: 17725 - RNA, 22 nt, synthetic construct
  misc_feature 1..22: note = HBV-targeting guide sequence portion
  source 1..22: mol_type = other RNA
tccaagctgtgccttgggtggc

SEQ ID NO: 17726 - RNA, 22 nt, synthetic construct
  misc_feature 1..22: note = HBV-targeting guide sequence portion
  source 1..22: mol_type = other RNA
tccaaggcatcccgatacagag

SEQ ID NO: 17727 - RNA, 22 nt, synthetic construct
  misc_feature 1..22: note = HBV-targeting guide sequence portion
  source 1..22: mol_type = other RNA
tccaagggatactaacattgag

SEQ ID NO: 17728 - RNA, 22 nt, synthetic construct
  misc_feature 1..22: note = HBV-targeting guide sequence portion
  source 1..22: mol_type = other RNA
tccaagggcaagtatttggtga

SEQ ID NO: 17729 - RNA, 22 nt, synthetic construct
  misc_feature 1..22: note = HBV-targeting guide sequence portion
  source 1..22: mol_type = other RNA
tccaatcaataggcctgttaac

SEQ ID NO: 17730 - RNA, 22 nt, synthetic construct
  misc_feature 1..22: note = HBV-targeting guide sequence portion
  source 1..22: mol_type = other RNA
tccaatcactcaccaacctcct

SEQ ID NO: 17731 - RNA, 22 nt, synthetic construct
  misc_feature 1..22: note = HBV-targeting guide sequence portion
  source 1..22: mol_type = other RNA
tccaatgagggttaaagacagg

SEQ ID NO: 17732 - RNA, 22 nt, synthetic construct
  misc_feature 1..22: note = HBV-targeting guide sequence portion
  source 1..22: mol_type = other RNA
tccacaaccttccaccaaactc

SEQ ID NO: 17733 - RNA, 22 nt, synthetic construct
  misc_feature 1..22: note = HBV-targeting guide sequence portion
  source 1..22: mol_type = other RNA
tccacactccaaaagacaccaa

SEQ ID NO: 17734 - RNA, 22 nt, synthetic construct
  misc_feature 1..22: note = HBV-targeting guide sequence portion
  source 1..22: mol_type = other RNA
tccacagtagctccaaattctt

SEQ ID NO: 17735 - RNA, 22 nt, synthetic construct
  misc_feature 1..22: note = HBV-targeting guide sequence portion
  source 1..22: mol_type = other RNA
tccaccaaactctgcaagatcc

SEQ ID NO: 17736 - RNA, 22 nt, synthetic construct
  misc_feature 1..22: note = HBV-targeting guide sequence portion
  source 1..22: mol_type = other RNA
tccaccacgagtctagactctg

SEQ ID NO: 17737 - RNA, 22 nt, synthetic construct
  misc_feature 1..22: note = HBV-targeting guide sequence portion
  source 1..22: mol_type = other RNA
tccaccagcaatcctctgggat

SEQ ID NO: 17738 - RNA, 22 nt, synthetic construct
  misc_feature 1..22: note = HBV-targeting guide sequence portion
  source 1..22: mol_type = other RNA
tccaccccaaaaggcctccgtg

SEQ ID NO: 17739 - RNA, 22 nt, synthetic construct
  misc_feature 1..22: note = HBV-targeting guide sequence portion
  source 1..22: mol_type = other RNA
tccacctctgagaaacactcat

SEQ ID NO: 17740 - RNA, 22 nt, synthetic construct
  misc_feature 1..22: note = HBV-targeting guide sequence portion
  source 1..22: mol_type = other RNA
tccacgcatgcgctgatggcct

SEQ ID NO: 17741 - RNA, 22 nt, synthetic construct
  misc_feature 1..22: note = HBV-targeting guide sequence portion
  source 1..22: mol_type = other RNA
tccagaacatctagttaatcat

SEQ ID NO: 17742 - RNA, 22 nt, synthetic construct
  misc_feature 1..22: note = HBV-targeting guide sequence portion
  source 1..22: mol_type = other RNA
tccagaagaaccaacaagaaga

SEQ ID NO: 17743 - RNA, 22 nt, synthetic construct
  misc_feature 1..22: note = HBV-targeting guide sequence portion
  source 1..22: mol_type = other RNA
tccagaccggctgcgagcaaaa

SEQ ID NO: 17744 - RNA, 22 nt, synthetic construct
  misc_feature 1..22: note = HBV-targeting guide sequence portion
  source 1..22: mol_type = other RNA
tccagattgggacttcaatccc

SEQ ID NO: 17745 - RNA, 22 nt, synthetic construct
  misc_feature 1..22: note = HBV-targeting guide sequence portion
  source 1..22: mol_type = other RNA
tccagcgataaccaggacaagt

SEQ ID NO: 17746 - RNA, 22 nt, synthetic construct
  misc_feature 1..22: note = HBV-targeting guide sequence portion
  source 1..22: mol_type = other RNA
tccagctcctaccttgttggcg

SEQ ID NO: 17747 - RNA, 22 nt, synthetic construct
  misc_feature 1..22: note = HBV-targeting guide sequence portion
  source 1..22: mol_type = other RNA
tccagcttatagaccaccaaat

SEQ ID NO: 17748 - RNA, 22 nt, synthetic construct
  misc_feature 1..22: note = HBV-targeting guide sequence portion
  source 1..22: mol_type = other RNA
tccaggatcatcaaccaccagc

SEQ ID NO: 17749 - RNA, 22 nt, synthetic construct
  misc_feature 1..22: note = HBV-targeting guide sequence portion
  source 1..22: mol_type = other RNA
tccagttcaggaacagtaaacc

SEQ ID NO: 17750 - RNA, 22 nt, synthetic construct
  misc_feature 1..22: note = HBV-targeting guide sequence portion
  source 1..22: mol_type = other RNA
tccagttggcagcacagcctag

SEQ ID NO: 17751 - RNA, 22 nt, synthetic construct
  misc_feature 1..22: note = HBV-targeting guide sequence portion
  source 1..22: mol_type = other RNA
tccatactgcggaactcctagc

SEQ ID NO: 17752 - RNA, 22 nt, synthetic construct
  misc_feature 1..22: note = HBV-targeting guide sequence portion
  source 1..22: mol_type = other RNA
tccatagagtgtgtaaatagtg

SEQ ID NO: 17753 - RNA, 22 nt, synthetic construct
  misc_feature 1..22: note = HBV-targeting guide sequence portion
  source 1..22: mol_type = other RNA
tccatataactgaaagccaaac

SEQ ID NO: 17754 - RNA, 22 nt, synthetic construct
  misc_feature 1..22: note = HBV-targeting guide sequence portion
  source 1..22: mol_type = other RNA
tccatccgaaggttttgtacag

SEQ ID NO: 17755 - RNA, 22 nt, synthetic construct
  misc_feature 1..22: note = HBV-targeting guide sequence portion
  source 1..22: mol_type = other RNA
tccatgccctaaagccacccaa

SEQ ID NO: 17756 - RNA, 22 nt, synthetic construct
  misc_feature 1..22: note = HBV-targeting guide sequence portion
  source 1..22: mol_type = other RNA
tccatgcgacgtgcagaggtga

SEQ ID NO: 17757 - RNA, 22 nt, synthetic construct
  misc_feature 1..22: note = HBV-targeting guide sequence portion
  source 1..22: mol_type = other RNA
tccatgttcagcgcagggtccc

SEQ ID NO: 17758 - RNA, 22 nt, synthetic construct
  misc_feature 1..22: note = HBV-targeting guide sequence portion
  source 1..22: mol_type = other RNA
tcccaacaaggatccctggcca

SEQ ID NO: 17759 - RNA, 22 nt, synthetic construct
  misc_feature 1..22: note = HBV-targeting guide sequence portion
  source 1..22: mol_type = other RNA
tcccaagaatatggtgacccac

SEQ ID NO: 17760 - RNA, 22 nt, synthetic construct
  misc_feature 1..22: note = HBV-targeting guide sequence portion
  source 1..22: mol_type = other RNA
tcccaatctggattgttggagt

SEQ ID NO: 17761 - RNA, 22 nt, synthetic construct
  misc_feature 1..22: note = HBV-targeting guide sequence portion
  source 1..22: mol_type = other RNA
tcccaccttatgagtccaaggg

SEQ ID NO: 17762 - RNA, 22 nt, synthetic construct
  misc_feature 1..22: note = HBV-targeting guide sequence portion
  source 1..22: mol_type = other RNA
tcccagaggattgctggtggaa

SEQ ID NO: 17763 - RNA, 22 nt, synthetic construct
  misc_feature 1..22: note = HBV-targeting guide sequence portion
  source 1..22: mol_type = other RNA
tcccagagtgagaggcctgtat

SEQ ID NO: 17764 - RNA, 22 nt, synthetic construct
  misc_feature 1..22: note = HBV-targeting guide sequence portion
  source 1..22: mol_type = other RNA
tcccagtctttaaacaaacagt

SEQ ID NO: 17765 - RNA, 22 nt, synthetic construct
  misc_feature 1..22: note = HBV-targeting guide sequence portion
  source 1..22: mol_type = other RNA
tcccataggaattttccgaaag

SEQ ID NO: 17766 - RNA, 22 nt, synthetic construct
  misc_feature 1..22: note = HBV-targeting guide sequence portion
  source 1..22: mol_type = other RNA
tcccatcatcctgggctttcgg

SEQ ID NO: 17767 - RNA, 22 nt, synthetic construct
  misc_feature 1..22: note = HBV-targeting guide sequence portion
  source 1..22: mol_type = other RNA
tcccatcccatcatcctgggct

SEQ ID NO: 17768 - RNA, 22 nt, synthetic construct
  misc_feature 1..22: note = HBV-targeting guide sequence portion
  source 1..22: mol_type = other RNA
tcccatggctgctaggctgtgc

SEQ ID NO: 17769 - RNA, 22 nt, synthetic construct
  misc_feature 1..22: note = HBV-targeting guide sequence portion
  source 1..22: mol_type = other RNA
tccccaacaatcaatgacatag

SEQ ID NO: 17770 - RNA, 22 nt, synthetic construct
  misc_feature 1..22: note = HBV-targeting guide sequence portion
  source 1..22: mol_type = other RNA
tccccaacctccaatcactcac

SEQ ID NO: 17771 - RNA, 22 nt, synthetic construct
  misc_feature 1..22: note = HBV-targeting guide sequence portion
  source 1..22: mol_type = other RNA
tccccaatcctcgagaagattg

SEQ ID NO: 17772 - RNA, 22 nt, synthetic construct
  misc_feature 1..22: note = HBV-targeting guide sequence portion
  source 1..22: mol_type = other RNA
tccccagcaaagaattgcttgc

SEQ ID NO: 17773 - RNA, 22 nt, synthetic construct
  misc_feature 1..22: note = HBV-targeting guide sequence portion
  source 1..22: mol_type = other RNA
tcccccaactcctcccagtctt

SEQ ID NO: 17774 - RNA, 22 nt, synthetic construct
  misc_feature 1..22: note = HBV-targeting guide sequence portion
  source 1..22: mol_type = other RNA
tcccccactgtttggctttcag

SEQ ID NO: 17775 - RNA, 22 nt, synthetic construct
  misc_feature 1..22: note = HBV-targeting guide sequence portion
  source 1..22: mol_type = other RNA
tccccctagaaaattgagagaa

SEQ ID NO: 17776 - RNA, 22 nt, synthetic construct
  misc_feature 1..22: note = HBV-targeting guide sequence portion
  source 1..22: mol_type = other RNA
tccccgagattgagatcttctg

SEQ ID NO: 17777 - RNA, 22 nt, synthetic construct
  misc_feature 1..22: note = HBV-targeting guide sequence portion
  source 1..22: mol_type = other RNA
tccccgtctgtgccttctcatc

SEQ ID NO: 17778 - RNA, 22 nt, synthetic construct
  misc_feature 1..22: note = HBV-targeting guide sequence portion
  source 1..22: mol_type = other RNA
tcccctagaagaagaactccct

SEQ ID NO: 17779 - RNA, 22 nt, synthetic construct
  misc_feature 1..22: note = HBV-targeting guide sequence portion
  source 1..22: mol_type = other RNA
tcccgaccaccagttggaccca

SEQ ID NO: 17780 - RNA, 22 nt, synthetic construct
  misc_feature 1..22: note = HBV-targeting guide sequence portion
  source 1..22: mol_type = other RNA
tcccgagaatgtttgctccaga

SEQ ID NO: 17781 - RNA, 22 nt, synthetic construct
  misc_feature 1..22: note = HBV-targeting guide sequence portion
  source 1..22: mol_type = other RNA
tcccgatacagagctgcggcgg

SEQ ID NO: 17782 - RNA, 22 nt, synthetic construct
  misc_feature 1..22: note = HBV-targeting guide sequence portion
  source 1..22: mol_type = other RNA
tcccgcaaatatacatcgttcc

SEQ ID NO: 17783 - RNA, 22 nt, synthetic construct
  misc_feature 1..22: note = HBV-targeting guide sequence portion
  source 1..22: mol_type = other RNA
tcccgcgcaggatccagttggc

SEQ ID NO: 17784 - RNA, 22 nt, synthetic construct
  misc_feature 1..22: note = HBV-targeting guide sequence portion
  source 1..22: mol_type = other RNA
tcccgcggacgacccatctcga

SEQ ID NO: 17785 - RNA, 22 nt, synthetic construct
  misc_feature 1..22: note = HBV-targeting guide sequence portion
  source 1..22: mol_type = other RNA
tcccggttaacaggcctattga

SEQ ID NO: 17786 - RNA, 22 nt, synthetic construct
  misc_feature 1..22: note = HBV-targeting guide sequence portion
  source 1..22: mol_type = other RNA
tcccgtcggcgctgaatcccgc

SEQ ID NO: 17787 - RNA, 22 nt, synthetic construct
  misc_feature 1..22: note = HBV-targeting guide sequence portion
  source 1..22: mol_type = other RNA
tcccgtctgtcctctaattcca

SEQ ID NO: 17788 - RNA, 22 nt, synthetic construct
  misc_feature 1..22: note = HBV-targeting guide sequence portion
  source 1..22: mol_type = other RNA
tcccgtgctggtggttgatgat

SEQ ID NO: 17789 - RNA, 22 nt, synthetic construct
  misc_feature 1..22: note = HBV-targeting guide sequence portion
  source 1..22: mol_type = other RNA
tccctagatgcttgatcttcta

SEQ ID NO: 17790 - RNA, 22 nt, synthetic construct
  misc_feature 1..22: note = HBV-targeting guide sequence portion
  source 1..22: mol_type = other RNA
tccctcctgttgctgtacaaaa

SEQ ID NO: 17791 - RNA, 22 nt, synthetic construct
  misc_feature 1..22: note = HBV-targeting guide sequence portion
  source 1..22: mol_type = other RNA
tccctcgcctcgcagacgaaga

SEQ ID NO: 17792 - RNA, 22 nt, synthetic construct
  misc_feature 1..22: note = HBV-targeting guide sequence portion
  source 1..22: mol_type = other RNA
tccctgctggtggctccagttc

SEQ ID NO: 17793 - RNA, 22 nt, synthetic construct
  misc_feature 1..22: note = HBV-targeting guide sequence portion
  source 1..22: mol_type = other RNA
tccctggccagacgccaacaag

SEQ ID NO: 17794 - RNA, 22 nt, synthetic construct
  misc_feature 1..22: note = HBV-targeting guide sequence portion
  source 1..22: mol_type = other RNA
tcccttggactcataaggtggg

SEQ ID NO: 17795 - RNA, 22 nt, synthetic construct
  misc_feature 1..22: note = HBV-targeting guide sequence portion
  source 1..22: mol_type = other RNA
tccctttataccgctgttacca

SEQ ID NO: 17796 - RNA, 22 nt, synthetic construct
  misc_feature 1..22: note = HBV-targeting guide sequence portion
  source 1..22: mol_type = other RNA
tccgaaagcccaggatgatggg

SEQ ID NO: 17797 - RNA, 22 nt, synthetic construct
  misc_feature 1..22: note = HBV-targeting guide sequence portion
  source 1..22: mol_type = other RNA
tccgaaggttttgtacagcaac

SEQ ID NO: 17798 - RNA, 22 nt, synthetic construct
  misc_feature 1..22: note = HBV-targeting guide sequence portion
  source 1..22: mol_type = other RNA
tccgaccgaccacggggcgcac

SEQ ID NO: 17799 - RNA, 22 nt, synthetic construct
  misc_feature 1..22: note = HBV-targeting guide sequence portion
  source 1..22: mol_type = other RNA
tccgactactgcctctcacata

SEQ ID NO: 17800 - RNA, 22 nt, synthetic construct
  misc_feature 1..22: note = HBV-targeting guide sequence portion
  source 1..22: mol_type = other RNA
tccgcagtatggatcggcagag

SEQ ID NO: 17801 - RNA, 22 nt, synthetic construct
  misc_feature 1..22: note = HBV-targeting guide sequence portion
  source 1..22: mol_type = other RNA
tccgcctcctgcctctaccaat

SEQ ID NO: 17802 - RNA, 22 nt, synthetic construct
  misc_feature 1..22: note = HBV-targeting guide sequence portion
  source 1..22: mol_type = other RNA
tccgcgggattcagcgccgacg

SEQ ID NO: 17803 - RNA, 22 nt, synthetic construct
  misc_feature 1..22: note = HBV-targeting guide sequence portion
  source 1..22: mol_type = other RNA
tccgcgtaaagagaggtgcgcc

SEQ ID NO: 17804 - RNA, 22 nt, synthetic construct
  misc_feature 1..22: note = HBV-targeting guide sequence portion
  source 1..22: mol_type = other RNA
tccggaagtgttgataggatag

SEQ ID NO: 17805 - RNA, 22 nt, synthetic construct
  misc_feature 1..22: note = HBV-targeting guide sequence portion
  source 1..22: mol_type = other RNA
tccggagacttgtgttgttaga

SEQ ID NO: 17806 - RNA, 22 nt, synthetic construct
  misc_feature 1..22: note = HBV-targeting guide sequence portion
  source 1..22: mol_type = other RNA
tccggcagatgagaaggcacag

SEQ ID NO: 17807 - RNA, 22 nt, synthetic construct
  misc_feature 1..22: note = HBV-targeting guide sequence portion
  source 1..22: mol_type = other RNA
tccggctcctctgccgatccat

SEQ ID NO: 17808 - RNA, 22 nt, synthetic construct
  misc_feature 1..22: note = HBV-targeting guide sequence portion
  source 1..22: mol_type = other RNA
tccgtacgagatcttctagata

SEQ ID NO: 17809 - RNA, 22 nt, synthetic construct
  misc_feature 1..22: note = HBV-targeting guide sequence portion
  source 1..22: mol_type = other RNA
tccgtgcggtggggtgaaccct

SEQ ID NO: 17810 - RNA, 22 nt, synthetic construct
  misc_feature 1..22: note = HBV-targeting guide sequence portion
  source 1..22: mol_type = other RNA
tcctaaattcaccaaatacttg

SEQ ID NO: 17811 - RNA, 22 nt, synthetic construct
  misc_feature 1..22: note = HBV-targeting guide sequence portion
  source 1..22: mol_type = other RNA
tcctaatatacatctacaccaa

SEQ ID NO: 17812 - RNA, 22 nt, synthetic construct
  misc_feature 1..22: note = HBV-targeting guide sequence portion
  source 1..22: mol_type = other RNA
tcctaccttgttggcgtctggc

SEQ ID NO: 17813 - RNA, 22 nt, synthetic construct
  misc_feature 1..22: note = HBV-targeting guide sequence portion
  source 1..22: mol_type = other RNA
tcctactgttcaagcctccaag

SEQ ID NO: 17814 - RNA, 22 nt, synthetic construct
  misc_feature 1..22: note = HBV-targeting guide sequence portion
  source 1..22: mol_type = other RNA
tcctagagtatttggtgtcttt

SEQ ID NO: 17815 - RNA, 22 nt, synthetic construct
  misc_feature 1..22: note = HBV-targeting guide sequence portion
  source 1..22: mol_type = other RNA
tcctagccgcttgttttgctcg

SEQ ID NO: 17816 - RNA, 22 nt, synthetic construct
  misc_feature 1..22: note = HBV-targeting guide sequence portion
  source 1..22: mol_type = other RNA
tcctaggaatcctgatgtgatg

SEQ ID NO: 17817 - RNA, 22 nt, synthetic construct
  misc_feature 1..22: note = HBV-targeting guide sequence portion
  source 1..22: mol_type = other RNA
tcctaggacccctgctcgtgtt

SEQ ID NO: 17818 - RNA, 22 nt, synthetic construct
  misc_feature 1..22: note = HBV-targeting guide sequence portion
  source 1..22: mol_type = other RNA
tcctagtacaaagatcattaat

SEQ ID NO: 17819 - RNA, 22 nt, synthetic construct
  misc_feature 1..22: note = HBV-targeting guide sequence portion
  source 1..22: mol_type = other RNA
tcctatcaacacttccggagac

SEQ ID NO: 17820 - RNA, 22 nt, synthetic construct
  misc_feature 1..22: note = HBV-targeting guide sequence portion
  source 1..22: mol_type = other RNA
tcctatgggagtgggcctcagc

SEQ ID NO: 17821 - RNA, 22 nt, synthetic construct
  misc_feature 1..22: note = HBV-targeting guide sequence portion
  source 1..22: mol_type = other RNA
tcctcacaataccgcagagtct

SEQ ID NO: 17822 - RNA, 22 nt, synthetic construct
  misc_feature 1..22: note = HBV-targeting guide sequence portion
  source 1..22: mol_type = other RNA
tcctccaacttgtcctggttat

SEQ ID NO: 17823 - RNA, 22 nt, synthetic construct
  misc_feature 1..22: note = HBV-targeting guide sequence portion
  source 1..22: mol_type = other RNA
tcctccagcttatagaccacca

SEQ ID NO: 17824 - RNA, 22 nt, synthetic construct
  misc_feature 1..22: note = HBV-targeting guide sequence portion
  source 1..22: mol_type = other RNA
tcctcccagtctttaaacaaac

SEQ ID NO: 17825 - RNA, 22 nt, synthetic construct
  misc_feature 1..22: note = HBV-targeting guide sequence portion
  source 1..22: mol_type = other RNA
tcctcccccaactcctcccagt

SEQ ID NO: 17826 - RNA, 22 nt, synthetic construct
  misc_feature 1..22: note = HBV-targeting guide sequence portion
  source 1..22: mol_type = other RNA
tcctcgagaagattgacgatat

SEQ ID NO: 17827 - RNA, 22 nt, synthetic construct
  misc_feature 1..22: note = HBV-targeting guide sequence portion
  source 1..22: mol_type = other RNA
tcctctaattccaggatcatca

SEQ ID NO: 17828 - RNA, 22 nt, synthetic construct
  misc_feature 1..22: note = HBV-targeting guide sequence portion
  source 1..22: mol_type = other RNA
tcctctcccgcaaatatacatc

SEQ ID NO: 17829 - RNA, 22 nt, synthetic construct
  misc_feature 1..22: note = HBV-targeting guide sequence portion
  source 1..22: mol_type = other RNA
tcctctgccgatccatactgcg

SEQ ID NO: 17830 - RNA, 22 nt, synthetic construct
  misc_feature 1..22: note = HBV-targeting guide sequence portion
  source 1..22: mol_type = other RNA
tcctctgggattctttcccgac

SEQ ID NO: 17831 - RNA, 22 nt, synthetic construct
  misc_feature 1..22: note = HBV-targeting guide sequence portion
  source 1..22: mol_type = other RNA
tcctcttatgtaagaccttggg

SEQ ID NO: 17832 - RNA, 22 nt, synthetic construct
  misc_feature 1..22: note = HBV-targeting guide sequence portion
  source 1..22: mol_type = other RNA
tcctcttcatcctgctgctatg

SEQ ID NO: 17833 - RNA, 22 nt, synthetic construct
  misc_feature 1..22: note = HBV-targeting guide sequence portion
  source 1..22: mol_type = other RNA
tcctcttctctgcctgccgttc

SEQ ID NO: 17834 - RNA, 22 nt, synthetic construct
  misc_feature 1..22: note = HBV-targeting guide sequence portion
  source 1..22: mol_type = other RNA
tcctgaactggagccaccagca

SEQ ID NO: 17835 - RNA, 22 nt, synthetic construct
  misc_feature 1..22: note = HBV-targeting guide sequence portion
  source 1..22: mol_type = other RNA
tcctgactggcgattggtagag

SEQ ID NO: 17836 - RNA, 22 nt, synthetic construct
  misc_feature 1..22: note = HBV-targeting guide sequence portion
  source 1..22: mol_type = other RNA
tcctgagcattgttcacctcac

SEQ ID NO: 17837 - RNA, 22 nt, synthetic construct
  misc_feature 1..22: note = HBV-targeting guide sequence portion
  source 1..22: mol_type = other RNA
tcctgatgtgatgttctccatg

SEQ ID NO: 17838 - RNA, 22 nt, synthetic construct
  misc_feature 1..22: note = HBV-targeting guide sequence portion
  source 1..22: mol_type = other RNA
tcctgcctctaccaatcgccag

SEQ ID NO: 17839 - RNA, 22 nt, synthetic construct
  misc_feature 1..22: note = HBV-targeting guide sequence portion
  source 1..22: mol_type = other RNA
tcctgcgcgggacgtcctttgt

SEQ ID NO: 17840 - RNA, 22 nt, synthetic construct
  misc_feature 1..22: note = HBV-targeting guide sequence portion
  source 1..22: mol_type = other RNA
tcctgctcaaggaacctctatg

SEQ ID NO: 17841 - RNA, 22 nt, synthetic construct
  misc_feature 1..22: note = HBV-targeting guide sequence portion
  source 1..22: mol_type = other RNA
tcctgctgctatgcctcatctt

SEQ ID NO: 17842 - RNA, 22 nt, synthetic construct
  misc_feature 1..22: note = HBV-targeting guide sequence portion
  source 1..22: mol_type = other RNA
tcctgctttaatgcccttgtat

SEQ ID NO: 17843 - RNA, 22 nt, synthetic construct
  misc_feature 1..22: note = HBV-targeting guide sequence portion
  source 1..22: mol_type = other RNA
tcctggaattagaggacagacg

SEQ ID NO: 17844 - RNA, 22 nt, synthetic construct
  misc_feature 1..22: note = HBV-targeting guide sequence portion
  source 1..22: mol_type = other RNA
tcctgggctttcggaaaattcc

SEQ ID NO: 17845 - RNA, 22 nt, synthetic construct
  misc_feature 1..22: note = HBV-targeting guide sequence portion
  source 1..22: mol_type = other RNA
tcctggttatcgctggatgtgt

SEQ ID NO: 17846 - RNA, 22 nt, synthetic construct
  misc_feature 1..22: note = HBV-targeting guide sequence portion
  source 1..22: mol_type = other RNA
tcctgtcctccaacttgtcctg

SEQ ID NO: 17847 - RNA, 22 nt, synthetic construct
  misc_feature 1..22: note = HBV-targeting guide sequence portion
  source 1..22: mol_type = other RNA
tcctgttgctgtacaaaacctt

SEQ ID NO: 17848 - RNA, 22 nt, synthetic construct
  misc_feature 1..22: note = HBV-targeting guide sequence portion
  source 1..22: mol_type = other RNA
tccttccgtacgagatcttcta

SEQ ID NO: 17849 - RNA, 22 nt, synthetic construct
  misc_feature 1..22: note = HBV-targeting guide sequence portion
  source 1..22: mol_type = other RNA
tccttgagcaggagtcgtgcag

SEQ ID NO: 17850 - RNA, 22 nt, synthetic construct
  misc_feature 1..22: note = HBV-targeting guide sequence portion
  source 1..22: mol_type = other RNA
tccttgttgacaagaatcctca

SEQ ID NO: 17851 - RNA, 22 nt, synthetic construct
  misc_feature 1..22: note = HBV-targeting guide sequence portion
  source 1..22: mol_type = other RNA
tccttgttgggattgaagtccc

SEQ ID NO: 17852 - RNA, 22 nt, synthetic construct
  misc_feature 1..22: note = HBV-targeting guide sequence portion
  source 1..22: mol_type = other RNA
tcctttgtttacgtcccgtcgg

SEQ ID NO: 17853 - RNA, 22 nt, synthetic construct
  misc_feature 1..22: note = HBV-targeting guide sequence portion
  source 1..22: mol_type = other RNA
tcgagaagattgacgatatgtg

SEQ ID NO: 17854 - RNA, 22 nt, synthetic construct
  misc_feature 1..22: note = HBV-targeting guide sequence portion
  source 1..22: mol_type = other RNA
tcgagatgggtcgtccgcggga

SEQ ID NO: 17855 - RNA, 22 nt, synthetic construct
  misc_feature 1..22: note = HBV-targeting guide sequence portion
  source 1..22: mol_type = other RNA
tcgaggattggggaccctgcgc

SEQ ID NO: 17856 - RNA, 22 nt, synthetic construct
  misc_feature 1..22: note = HBV-targeting guide sequence portion
  source 1..22: mol_type = other RNA
tcgaggccgcttggggccctgt

SEQ ID NO: 17857 - RNA, 22 nt, synthetic construct
  misc_feature 1..22: note = HBV-targeting guide sequence portion
  source 1..22: mol_type = other RNA
tcgcactcctccagcttataga

SEQ ID NO: 17858 - RNA, 22 nt, synthetic construct
  misc_feature 1..22: note = HBV-targeting guide sequence portion
  source 1..22: mol_type = other RNA
tcgcagaagatctcaatctcgg

SEQ ID NO: 17859 - RNA, 22 nt, synthetic construct
  misc_feature 1..22: note = HBV-targeting guide sequence portion
  source 1..22: mol_type = other RNA
tcgcagacgaagatctcaatcg

SEQ ID NO: 17860 - RNA, 22 nt, synthetic construct
  misc_feature 1..22: note = HBV-targeting guide sequence portion
  source 1..22: mol_type = other RNA
tcgcagccggtctggagcaaac

SEQ ID NO: 17861 - RNA, 22 nt, synthetic construct
  misc_feature 1..22: note = HBV-targeting guide sequence portion
  source 1..22: mol_type = other RNA
tcgcagtccccaacctccaatc

SEQ ID NO: 17862 - RNA, 22 nt, synthetic construct
  misc_feature 1..22: note = HBV-targeting guide sequence portion
  source 1..22: mol_type = other RNA
tcgcatggagaccaccgtgaac

SEQ ID NO: 17863 - RNA, 22 nt, synthetic construct
  misc_feature 1..22: note = HBV-targeting guide sequence portion
  source 1..22: mol_type = other RNA
tcgccaacttacaaggcctttc

SEQ ID NO: 17864 - RNA, 22 nt, synthetic construct
  misc_feature 1..22: note = HBV-targeting guide sequence portion
  source 1..22: mol_type = other RNA
tcgccagtcaggacggcagcct

SEQ ID NO: 17865 - RNA, 22 nt, synthetic construct
  misc_feature 1..22: note = HBV-targeting guide sequence portion
  source 1..22: mol_type = other RNA
tcgccgcgtcgcagaagatctc

SEQ ID NO: 17866 - RNA, 22 nt, synthetic construct
  misc_feature 1..22: note = HBV-targeting guide sequence portion
  source 1..22: mol_type = other RNA
tcgcctcgcagacgaagatctc

SEQ ID NO: 17867 - RNA, 22 nt, synthetic construct
  misc_feature 1..22: note = HBV-targeting guide sequence portion
  source 1..22: mol_type = other RNA
tcgctggatgtgtctgcggcgt

SEQ ID NO: 17868 - RNA, 22 nt, synthetic construct
  misc_feature 1..22: note = HBV-targeting guide sequence portion
  source 1..22: mol_type = other RNA
tcgcttcacctctgcacgtcgc

SEQ ID NO: 17869 - RNA, 22 nt, synthetic construct
  misc_feature 1..22: note = HBV-targeting guide sequence portion
  source 1..22: mol_type = other RNA
tcggaaaattcctatgggagtg

SEQ ID NO: 17870 - RNA, 22 nt, synthetic construct
  misc_feature 1..22: note = HBV-targeting guide sequence portion
  source 1..22: mol_type = other RNA
tcggaacagggtttactgttcc

SEQ ID NO: 17871 - RNA, 22 nt, synthetic construct
  misc_feature 1..22: note = HBV-targeting guide sequence portion
  source 1..22: mol_type = other RNA
tcggaacggcaggcagagaaga

SEQ ID NO: 17872 - RNA, 22 nt, synthetic construct
  misc_feature 1..22: note = HBV-targeting guide sequence portion
  source 1..22: mol_type = other RNA
tcggatggaaactgcacctgta

SEQ ID NO: 17873 - RNA, 22 nt, synthetic construct
  misc_feature 1..22: note = HBV-targeting guide sequence portion
  source 1..22: mol_type = other RNA
tcggcagaggagccggaaaggt

SEQ ID NO: 17874 - RNA, 22 nt, synthetic construct
  misc_feature 1..22: note = HBV-targeting guide sequence portion
  source 1..22: mol_type = other RNA
tcggcgctgaatcccgcggacg

SEQ ID NO: 17875 - RNA, 22 nt, synthetic construct
  misc_feature 1..22: note = HBV-targeting guide sequence portion
  source 1..22: mol_type = other RNA
tcgggaaagaatcccagaggat

SEQ ID NO: 17876 - RNA, 22 nt, synthetic construct
  misc_feature 1..22: note = HBV-targeting guide sequence portion
  source 1..22: mol_type = other RNA
tcgggactgacaactctgttgt

SEQ ID NO: 17877 - RNA, 22 nt, synthetic construct
  misc_feature 1..22: note = HBV-targeting guide sequence portion
  source 1..22: mol_type = other RNA
tcgggatgccttggagtctcct

SEQ ID NO: 17878 - RNA, 22 nt, synthetic construct
  misc_feature 1..22: note = HBV-targeting guide sequence portion
  source 1..22: mol_type = other RNA
tcgggctagggttcaccccacc

SEQ ID NO: 17879 - RNA, 22 nt, synthetic construct
  misc_feature 1..22: note = HBV-targeting guide sequence portion
  source 1..22: mol_type = other RNA
tcggggatctcaatgttagtat

SEQ ID NO: 17880 - RNA, 22 nt, synthetic construct
  misc_feature 1..22: note = HBV-targeting guide sequence portion
  source 1..22: mol_type = other RNA
tcggtcggaacggcaggcagag

SEQ ID NO: 17881 - RNA, 22 nt, synthetic construct
  misc_feature 1..22: note = HBV-targeting guide sequence portion
  source 1..22: mol_type = other RNA
tcggtcgttgacattgcagaga

SEQ ID NO: 17882 - RNA, 22 nt, synthetic construct
  misc_feature 1..22: note = HBV-targeting guide sequence portion
  source 1..22: mol_type = other RNA
tcgtacggaaggaaagaagtca

SEQ ID NO: 17883 - RNA, 22 nt, synthetic construct
  misc_feature 1..22: note = HBV-targeting guide sequence portion
  source 1..22: mol_type = other RNA
tcgtagggctttcccccactgt

SEQ ID NO: 17884 - RNA, 22 nt, synthetic construct
  misc_feature 1..22: note = HBV-targeting guide sequence portion
  source 1..22: mol_type = other RNA
tcgtcaatcttctcgaggattg

SEQ ID NO: 17885 - RNA, 22 nt, synthetic construct
  misc_feature 1..22: note = HBV-targeting guide sequence portion
  source 1..22: mol_type = other RNA
tcgtccgcgggattcagcgccg

SEQ ID NO: 17886 - RNA, 22 nt, synthetic construct
  misc_feature 1..22: note = HBV-targeting guide sequence portion
  source 1..22: mol_type = other RNA
tcgtcctcttctctgcctgccg

SEQ ID NO: 17887 - RNA, 22 nt, synthetic construct
  misc_feature 1..22: note = HBV-targeting guide sequence portion
  source 1..22: mol_type = other RNA
tcgtcgtctaacaacacaagtc

SEQ ID NO: 17888 - RNA, 22 nt, synthetic construct
  misc_feature 1..22: note = HBV-targeting guide sequence portion
  source 1..22: mol_type = other RNA
tcgtctaacaacacaagtctcc

SEQ ID NO: 17889 - RNA, 22 nt, synthetic construct
  misc_feature 1..22: note = HBV-targeting guide sequence portion
  source 1..22: mol_type = other RNA
tcgtctgcgaggcgagggagtt

SEQ ID NO: 17890 - RNA, 22 nt, synthetic construct
  misc_feature 1..22: note = HBV-targeting guide sequence portion
  source 1..22: mol_type = other RNA
tcgtgcaggttctgcagggtcc

SEQ ID NO: 17891 - RNA, 22 nt, synthetic construct
  misc_feature 1..22: note = HBV-targeting guide sequence portion
  source 1..22: mol_type = other RNA
tcgtggtggacttctctcaatt

SEQ ID NO: 17892 - RNA, 22 nt, synthetic construct
  misc_feature 1..22: note = HBV-targeting guide sequence portion
  source 1..22: mol_type = other RNA
tcgtgttacaggcggggttttc

SEQ ID NO: 17893 - RNA, 22 nt, synthetic construct
  misc_feature 1..22: note = HBV-targeting guide sequence portion
  source 1..22: mol_type = other RNA
tcgttcccatggctgctaggct

SEQ ID NO: 17894 - RNA, 22 nt, synthetic construct
  misc_feature 1..22: note = HBV-targeting guide sequence portion
  source 1..22: mol_type = other RNA
tcgttgacacactttccaatca

SEQ ID NO: 17895 - RNA, 22 nt, synthetic construct
  misc_feature 1..22: note = HBV-targeting guide sequence portion
  source 1..22: mol_type = other RNA
tcgttgacattgcagagagtcc

SEQ ID NO: 17896 - RNA, 22 nt, synthetic construct
  misc_feature 1..22: note = HBV-targeting guide sequence portion
  source 1..22: mol_type = other RNA
tcgtttttgccttctgacttct

SEQ ID NO: 17897 - RNA, 22 nt, synthetic construct
  misc_feature 1..22: note = HBV-targeting guide sequence portion
  source 1..22: mol_type = other RNA
tctaaattagtacccacccagg

SEQ ID NO: 17898 - RNA, 22 nt, synthetic construct
  misc_feature 1..22: note = HBV-targeting guide sequence portion
  source 1..22: mol_type = other RNA
tctaacaacacaagtctccgga

SEQ ID NO: 17899 - RNA, 22 nt, synthetic construct
  misc_feature 1..22: note = HBV-targeting guide sequence portion
  source 1..22: mol_type = other RNA
tctaagcaggctttcacttttt

SEQ ID NO: 17900 - RNA, 22 nt, synthetic construct
  misc_feature 1..22: note = HBV-targeting guide sequence portion
  source 1..22: mol_type = other RNA
tctaatctcctcccccaactcc

SEQ ID NO: 17901 - RNA, 22 nt, synthetic construct
  misc_feature 1..22: note = HBV-targeting guide sequence portion
  source 1..22: mol_type = other RNA
tctaattccaggatcatcaacc

SEQ ID NO: 17902 - RNA, 22 nt, synthetic construct
  misc_feature 1..22: note = HBV-targeting guide sequence portion
  source 1..22: mol_type = other RNA
tctacaccaagatattatcaaa

SEQ ID NO: 17903 - RNA, 22 nt, synthetic construct
  misc_feature 1..22: note = HBV-targeting guide sequence portion
  source 1..22: mol_type = other RNA
tctaccaatcgccagtcaggac

SEQ ID NO: 17904 - RNA, 22 nt, synthetic construct
  misc_feature 1..22: note = HBV-targeting guide sequence portion
  source 1..22: mol_type = other RNA
tctactgtacctgtctttaacc

SEQ ID NO: 17905 - RNA, 22 nt, synthetic construct
  misc_feature 1..22: note = HBV-targeting guide sequence portion
  source 1..22: mol_type = other RNA
tctagaagatctcgtacggaag

SEQ ID NO: 17906 - RNA, 22 nt, synthetic construct
  misc_feature 1..22: note = HBV-targeting guide sequence portion
  source 1..22: mol_type = other RNA
tctagactcgtggtggacttct

SEQ ID NO: 17907 - RNA, 22 nt, synthetic construct
  misc_feature 1..22: note = HBV-targeting guide sequence portion
  source 1..22: mol_type = other RNA
tctagactctgcggtattgtga

SEQ ID NO: 17908 - RNA, 22 nt, synthetic construct
  misc_feature 1..22: note = HBV-targeting guide sequence portion
  source 1..22: mol_type = other RNA
tctagataccgccgcagctctg

SEQ ID NO: 17909 - RNA, 22 nt, synthetic construct
  misc_feature 1..22: note = HBV-targeting guide sequence portion
  source 1..22: mol_type = other RNA
tctagctacctgggtgggtact

SEQ ID NO: 17910 - RNA, 22 nt, synthetic construct
  misc_feature 1..22: note = HBV-targeting guide sequence portion
  source 1..22: mol_type = other RNA
tctaggaccgtttctcttccaa

SEQ ID NO: 17911 - RNA, 22 nt, synthetic construct
  misc_feature 1..22: note = HBV-targeting guide sequence portion
  source 1..22: mol_type = other RNA
tctagggacctagtagtcagtt

SEQ ID NO: 17912 - RNA, 22 nt, synthetic construct
  misc_feature 1..22: note = HBV-targeting guide sequence portion
  source 1..22: mol_type = other RNA
tctaggggacctgcctcgtcgt

SEQ ID NO: 17913 - RNA, 22 nt, synthetic construct
  misc_feature 1..22: note = HBV-targeting guide sequence portion
  source 1..22: mol_type = other RNA
tctagggggaactaccgtgtgt

SEQ ID NO: 17914 - RNA, 22 nt, synthetic construct
  misc_feature 1..22: note = HBV-targeting guide sequence portion
  source 1..22: mol_type = other RNA
tctagttaatcattacttccaa

SEQ ID NO: 17915 - RNA, 22 nt, synthetic construct
  misc_feature 1..22: note = HBV-targeting guide sequence portion
  source 1..22: mol_type = other RNA
tctagtttggaagtaatgatta

SEQ ID NO: 17916 - RNA, 22 nt, synthetic construct
  misc_feature 1..22: note = HBV-targeting guide sequence portion
  source 1..22: mol_type = other RNA
tctataagctggaggagtgcga

SEQ ID NO: 17917 - RNA, 22 nt, synthetic construct
  misc_feature 1..22: note = HBV-targeting guide sequence portion
  source 1..22: mol_type = other RNA
tctatggaaggcgggtgtttta

SEQ ID NO: 17918 - RNA, 22 nt, synthetic construct
  misc_feature 1..22: note = HBV-targeting guide sequence portion
  source 1..22: mol_type = other RNA
tctatgtatccctcctgttgct

SEQ ID NO: 17919 - RNA, 22 nt, synthetic construct
  misc_feature 1..22: note = HBV-targeting guide sequence portion
  source 1..22: mol_type = other RNA
tctcaatcgccgcgtcgcagaa

SEQ ID NO: 17920 - RNA, 22 nt, synthetic construct
  misc_feature 1..22: note = HBV-targeting guide sequence portion
  source 1..22: mol_type = other RNA
tctcaatctcggggatctcaat

SEQ ID NO: 17921 - RNA, 22 nt, synthetic construct
  misc_feature 1..22: note = HBV-targeting guide sequence portion
  source 1..22: mol_type = other RNA
tctcaatgttagtatcccttgg

SEQ ID NO: 17922 - RNA, 22 nt, synthetic construct
  misc_feature 1..22: note = HBV-targeting guide sequence portion
  source 1..22: mol_type = other RNA
tctcaattttctagggggaact

SEQ ID NO: 17923 - RNA, 22 nt, synthetic construct
  misc_feature 1..22: note = HBV-targeting guide sequence portion
  source 1..22: mol_type = other RNA
tctcacatatcgtcaatcttct

SEQ ID NO: 17924 - RNA, 22 nt, synthetic construct
  misc_feature 1..22: note = HBV-targeting guide sequence portion
  source 1..22: mol_type = other RNA
tctcactctgggatcttgcaga

SEQ ID NO: 17925 - RNA, 22 nt, synthetic construct
  misc_feature 1..22: note = HBV-targeting guide sequence portion
  source 1..22: mol_type = other RNA
tctcagaggtggagacagcggg

SEQ ID NO: 17926 - RNA, 22 nt, synthetic construct
  misc_feature 1..22: note = HBV-targeting guide sequence portion
  source 1..22: mol_type = other RNA
tctcatctgccggaccgtgtgc

SEQ ID NO: 17927 - RNA, 22 nt, synthetic construct
  misc_feature 1..22: note = HBV-targeting guide sequence portion
  source 1..22: mol_type = other RNA
tctcattaactgtaagcgggcc

SEQ ID NO: 17928 - RNA, 22 nt, synthetic construct
  misc_feature 1..22: note = HBV-targeting guide sequence portion
  source 1..22: mol_type = other RNA
tctccacctctgagaaacactc

SEQ ID NO: 17929 - RNA, 22 nt, synthetic construct
  misc_feature 1..22: note = HBV-targeting guide sequence portion
  source 1..22: mol_type = other RNA
tctccatgcgacgtgcagaggt

SEQ ID NO: 17930 - RNA, 22 nt, synthetic construct
  misc_feature 1..22: note = HBV-targeting guide sequence portion
  source 1..22: mol_type = other RNA
tctccatgttcagcgcagggtc

SEQ ID NO: 17931 - RNA, 22 nt, synthetic construct
  misc_feature 1..22: note = HBV-targeting guide sequence portion
  source 1..22: mol_type = other RNA
tctccccagcaaagaattgctt

SEQ ID NO: 17932 - RNA, 22 nt, synthetic construct
  misc_feature 1..22: note = HBV-targeting guide sequence portion
  source 1..22: mol_type = other RNA
tctcccgcaaatatacatcgtt

SEQ ID NO: 17933 - RNA, 22 nt, synthetic construct
  misc_feature 1..22: note = HBV-targeting guide sequence portion
  source 1..22: mol_type = other RNA
tctccctgctggtggctccagt

SEQ ID NO: 17934 - RNA, 22 nt, synthetic construct
  misc_feature 1..22: note = HBV-targeting guide sequence portion
  source 1..22: mol_type = other RNA
tctccggaagtgttgataggat

SEQ ID NO: 17935 - RNA, 22 nt, synthetic construct
  misc_feature 1..22: note = HBV-targeting guide sequence portion
  source 1..22: mol_type = other RNA
tctcctcccccaactcctccca

SEQ ID NO: 17936 - RNA, 22 nt, synthetic construct
  misc_feature 1..22: note = HBV-targeting guide sequence portion
  source 1..22: mol_type = other RNA
tctcctgagcattgttcacctc

SEQ ID NO: 17937 - RNA, 22 nt, synthetic construct
  misc_feature 1..22: note = HBV-targeting guide sequence portion
  source 1..22: mol_type = other RNA
tctcgaggattggggaccctgc

SEQ ID NO: 17938 - RNA, 22 nt, synthetic construct
  misc_feature 1..22: note = HBV-targeting guide sequence portion
  source 1..22: mol_type = other RNA
tctcgaggccgcttggggccct

SEQ ID NO: 17939 - RNA, 22 nt, synthetic construct
  misc_feature 1..22: note = HBV-targeting guide sequence portion
  source 1..22: mol_type = other RNA
tctcgggactgacaactctgtt

SEQ ID NO: 17940 - RNA, 22 nt, synthetic construct
  misc_feature 1..22: note = HBV-targeting guide sequence portion
  source 1..22: mol_type = other RNA
tctcggggatctcaatgttagt

SEQ ID NO: 17941 - RNA, 22 nt, synthetic construct
  misc_feature 1..22: note = HBV-targeting guide sequence portion
  source 1..22: mol_type = other RNA
tctcgtacggaaggaaagaagt

SEQ ID NO: 17942 - RNA, 22 nt, synthetic construct
  misc_feature 1..22: note = HBV-targeting guide sequence portion
  source 1..22: mol_type = other RNA
tctcgtttttgccttctgactt

SEQ ID NO: 17943 - RNA, 22 nt, synthetic construct
  misc_feature 1..22: note = HBV-targeting guide sequence portion
  source 1..22: mol_type = other RNA
tctctcaattttctagggggaa

SEQ ID NO: 17944 - RNA, 22 nt, synthetic construct
  misc_feature 1..22: note = HBV-targeting guide sequence portion
  source 1..22: mol_type = other RNA
tctctgcaatgtcaacgaccga

SEQ ID NO: 17945 - RNA, 22 nt, synthetic construct
  misc_feature 1..22: note = HBV-targeting guide sequence portion
  source 1..22: mol_type = other RNA
tctctgcctgccgttccgaccg

SEQ ID NO: 17946 - RNA, 22 nt, synthetic construct
  misc_feature 1..22: note = HBV-targeting guide sequence portion
  source 1..22: mol_type = other RNA
tctcttaatttcatgggctatg

SEQ ID NO: 17947 - RNA, 22 nt, synthetic construct
  misc_feature 1..22: note = HBV-targeting guide sequence portion
  source 1..22: mol_type = other RNA
tctcttatataaaacacccgcc

SEQ ID NO: 17948 - RNA, 22 nt, synthetic construct
  misc_feature 1..22: note = HBV-targeting guide sequence portion
  source 1..22: mol_type = other RNA
tctcttccaaaagtaagacaag

SEQ ID NO: 17949 - RNA, 22 nt, synthetic construct
  misc_feature 1..22: note = HBV-targeting guide sequence portion
  source 1..22: mol_type = other RNA
tctcttggctcagtttactagt

SEQ ID NO: 17950 - RNA, 22 nt, synthetic construct
  misc_feature 1..22: note = HBV-targeting guide sequence portion
  source 1..22: mol_type = other RNA
tctcttgttcatgtcctactgt

SEQ ID NO: 17951 - RNA, 22 nt, synthetic construct
  misc_feature 1..22: note = HBV-targeting guide sequence portion
  source 1..22: mol_type = other RNA
tctctttacgcggactccccgt

SEQ ID NO: 17952 - RNA, 22 nt, synthetic construct
  misc_feature 1..22: note = HBV-targeting guide sequence portion
  source 1..22: mol_type = other RNA
tctctttgttttgttagggttt

SEQ ID NO: 17953 - RNA, 22 nt, synthetic construct
  misc_feature 1..22: note = HBV-targeting guide sequence portion
  source 1..22: mol_type = other RNA
tctgaaacattctttgattttg

SEQ ID NO: 17954 - RNA, 22 nt, synthetic construct
  misc_feature 1..22: note = HBV-targeting guide sequence portion
  source 1..22: mol_type = other RNA
tctgaactttaggcccatatga

SEQ ID NO: 17955 - RNA, 22 nt, synthetic construct
  misc_feature 1..22: note = HBV-targeting guide sequence portion
  source 1..22: mol_type = other RNA
tctgaaggctgggtccaactgg

SEQ ID NO: 17956 - RNA, 22 nt, synthetic construct
  misc_feature 1..22: note = HBV-targeting guide sequence portion
  source 1..22: mol_type = other RNA
tctgacttctttccttccgtac

SEQ ID NO: 17957 - RNA, 22 nt, synthetic construct
  misc_feature 1..22: note = HBV-targeting guide sequence portion
  source 1..22: mol_type = other RNA
tctgagaaacactcatcctcag

SEQ ID NO: 17958 - RNA, 22 nt, synthetic construct
  misc_feature 1..22: note = HBV-targeting guide sequence portion
  source 1..22: mol_type = other RNA
tctgcaagatcccagagtgaga

SEQ ID NO: 17959 - RNA, 22 nt, synthetic construct
  misc_feature 1..22: note = HBV-targeting guide sequence portion
  source 1..22: mol_type = other RNA
tctgcaatgtcaacgaccgacc

SEQ ID NO: 17960 - RNA, 22 nt, synthetic construct
  misc_feature 1..22: note = HBV-targeting guide sequence portion
  source 1..22: mol_type = other RNA
tctgcacgtcgcatggagacca

SEQ ID NO: 17961 - RNA, 22 nt, synthetic construct
  misc_feature 1..22: note = HBV-targeting guide sequence portion
  source 1..22: mol_type = other RNA
tctgcagggtcccgtgctggtg

SEQ ID NO: 17962 - RNA, 22 nt, synthetic construct
  misc_feature 1..22: note = HBV-targeting guide sequence portion
  source 1..22: mol_type = other RNA
tctgccccatgctgtagctctt

SEQ ID NO: 17963 - RNA, 22 nt, synthetic construct
  misc_feature 1..22: note = HBV-targeting guide sequence portion
  source 1..22: mol_type = other RNA
tctgccgatccatactgcggaa

SEQ ID NO: 17964 - RNA, 22 nt, synthetic construct
  misc_feature 1..22: note = HBV-targeting guide sequence portion
  source 1..22: mol_type = other RNA
tctgccggaccgtgtgcacttc

SEQ ID NO: 17965 - RNA, 22 nt, synthetic construct
  misc_feature 1..22: note = HBV-targeting guide sequence portion
  source 1..22: mol_type = other RNA
tctgcctaatcatctcttgttc

SEQ ID NO: 17966 - RNA, 22 nt, synthetic construct
  misc_feature 1..22: note = HBV-targeting guide sequence portion
  source 1..22: mol_type = other RNA
tctgcctgccgttccgaccgac

SEQ ID NO: 17967 - RNA, 22 nt, synthetic construct
  misc_feature 1..22: note = HBV-targeting guide sequence portion
  source 1..22: mol_type = other RNA
tctgcgacgcggcgattgagat

SEQ ID NO: 17968 - RNA, 22 nt, synthetic construct
  misc_feature 1..22: note = HBV-targeting guide sequence portion
  source 1..22: mol_type = other RNA
tctgcgaggcgagggagttctt

SEQ ID NO: 17969 - RNA, 22 nt, synthetic construct
  misc_feature 1..22: note = HBV-targeting guide sequence portion
  source 1..22: mol_type = other RNA
tctgcgcaccagcaccatgcaa

SEQ ID NO: 17970 - RNA, 22 nt, synthetic construct
  misc_feature 1..22: note = HBV-targeting guide sequence portion
  source 1..22: mol_type = other RNA
tctgcggcgttttatcatcttc

SEQ ID NO: 17971 - RNA, 22 nt, synthetic construct
  misc_feature 1..22: note = HBV-targeting guide sequence portion
  source 1..22: mol_type = other RNA
tctgcggtattgtgaggattct

SEQ ID NO: 17972 - RNA, 22 nt, synthetic construct
  misc_feature 1..22: note = HBV-targeting guide sequence portion
  source 1..22: mol_type = other RNA
tctggactatcaaggtatgttt

SEQ ID NO: 17973 - RNA, 22 nt, synthetic construct
  misc_feature 1..22: note = HBV-targeting guide sequence portion
  source 1..22: mol_type = other RNA
tctggagcaaacattctcggga

SEQ ID NO: 17974 - RNA, 22 nt, synthetic construct
  misc_feature 1..22: note = HBV-targeting guide sequence portion
  source 1..22: mol_type = other RNA
tctggataataaggtttaatac

SEQ ID NO: 17975 - RNA, 22 nt, synthetic construct
  misc_feature 1..22: note = HBV-targeting guide sequence portion
  source 1..22: mol_type = other RNA
tctggattgttggagtttgctc

SEQ ID NO: 17976 - RNA, 22 nt, synthetic construct
  misc_feature 1..22: note = HBV-targeting guide sequence portion
  source 1..22: mol_type = other RNA
tctggccagggatccttgttgg

SEQ ID NO: 17977 - RNA, 22 nt, synthetic construct
  misc_feature 1..22: note = HBV-targeting guide sequence portion
  source 1..22: mol_type = other RNA
tctgggatcttgcagagtttgg

SEQ ID NO: 17978 - RNA, 22 nt, synthetic construct
  misc_feature 1..22: note = HBV-targeting guide sequence portion
  source 1..22: mol_type = other RNA
tctgggattctttcccgaccac

SEQ ID NO: 17979 - RNA, 22 nt, synthetic construct
  misc_feature 1..22: note = HBV-targeting guide sequence portion
  source 1..22: mol_type = other RNA
tctgggttttgctgcccctttt

SEQ ID NO: 17980 - RNA, 22 nt, synthetic construct
  misc_feature 1..22: note = HBV-targeting guide sequence portion
  source 1..22: mol_type = other RNA
tctgtacagcatcttgagtccc

SEQ ID NO: 17981 - RNA, 22 nt, synthetic construct
  misc_feature 1..22: note = HBV-targeting guide sequence portion
  source 1..22: mol_type = other RNA
tctgtatcgggatgccttggag

SEQ ID NO: 17982 - RNA, 22 nt, synthetic construct
  misc_feature 1..22: note = HBV-targeting guide sequence portion
  source 1..22: mol_type = other RNA
tctgtcctctaattccaggatc

SEQ ID NO: 17983 - RNA, 22 nt, synthetic construct
  misc_feature 1..22: note = HBV-targeting guide sequence portion
  source 1..22: mol_type = other RNA
tctgtgccaagtgtttgctgat

SEQ ID NO: 17984 - RNA, 22 nt, synthetic construct
  misc_feature 1..22: note = HBV-targeting guide sequence portion
  source 1..22: mol_type = other RNA
tctgtgccttctcatctgccgg

SEQ ID NO: 17985 - RNA, 22 nt, synthetic construct
  misc_feature 1..22: note = HBV-targeting guide sequence portion
  source 1..22: mol_type = other RNA
tctgtgggtcaccatattcttg

SEQ ID NO: 17986 - RNA, 22 nt, synthetic construct
  misc_feature 1..22: note = HBV-targeting guide sequence portion
  source 1..22: mol_type = other RNA
tctgtgtaaacaatacctgaac

SEQ ID NO: 17987 - RNA, 22 nt, synthetic construct
  misc_feature 1..22: note = HBV-targeting guide sequence portion
  source 1..22: mol_type = other RNA
tctgttgtcctctcccgcaaat

SEQ ID NO: 17988 - RNA, 22 nt, synthetic construct
  misc_feature 1..22: note = HBV-targeting guide sequence portion
  source 1..22: mol_type = other RNA
tcttaatttcatgggctatgtc

SEQ ID NO: 17989 - RNA, 22 nt, synthetic construct
  misc_feature 1..22: note = HBV-targeting guide sequence portion
  source 1..22: mol_type = other RNA
tcttacataagaggactcttgg

SEQ ID NO: 17990 - RNA, 22 nt, synthetic construct
  misc_feature 1..22: note = HBV-targeting guide sequence portion
  source 1..22: mol_type = other RNA
tcttacttttggaagagaaacg

SEQ ID NO: 17991 - RNA, 22 nt, synthetic construct
  misc_feature 1..22: note = HBV-targeting guide sequence portion
  source 1..22: mol_type = other RNA
tcttatataaaacacccgcctt

SEQ ID NO: 17992 - RNA, 22 nt, synthetic construct
  misc_feature 1..22: note = HBV-targeting guide sequence portion
  source 1..22: mol_type = other RNA
tcttatgtaagaccttgggcaa

SEQ ID NO: 17993 - RNA, 22 nt, synthetic construct
  misc_feature 1..22: note = HBV-targeting guide sequence portion
  source 1..22: mol_type = other RNA
tcttcatcctgctgctatgcct

SEQ ID NO: 17994 - RNA, 22 nt, synthetic construct
  misc_feature 1..22: note = HBV-targeting guide sequence portion
  source 1..22: mol_type = other RNA
tcttccaaaagtaagacaagaa

SEQ ID NO: 17995 - RNA, 22 nt, synthetic construct
  misc_feature 1..22: note = HBV-targeting guide sequence portion
  source 1..22: mol_type = other RNA
tcttcctcttcatcctgctgct

SEQ ID NO: 17996 - RNA, 22 nt, synthetic construct
  misc_feature 1..22: note = HBV-targeting guide sequence portion
  source 1..22: mol_type = other RNA
tcttcgtctgcgaggcgaggga

SEQ ID NO: 17997 - RNA, 22 nt, synthetic construct
  misc_feature 1..22: note = HBV-targeting guide sequence portion
  source 1..22: mol_type = other RNA
tcttctaaattagtacccaccc

SEQ ID NO: 17998 - RNA, 22 nt, synthetic construct
  misc_feature 1..22: note = HBV-targeting guide sequence portion
  source 1..22: mol_type = other RNA
tcttctactgtacctgtcttta

SEQ ID NO: 17999 - RNA, 22 nt, synthetic construct
  misc_feature 1..22: note = HBV-targeting guide sequence portion
  source 1..22: mol_type = other RNA
tcttctagataccgccgcagct

SEQ ID NO: 18000 - RNA, 22 nt, synthetic construct
  misc_feature 1..22: note = HBV-targeting guide sequence portion
  source 1..22: mol_type = other RNA
tcttctaggggacctgcctcgt

SEQ ID NO: 18001 - RNA, 22 nt, synthetic construct
  misc_feature 1..22: note = HBV-targeting guide sequence portion
  source 1..22: mol_type = other RNA
tcttctcgaggattggggaccc

SEQ ID NO: 18002 - RNA, 22 nt, synthetic construct
  misc_feature 1..22: note = HBV-targeting guide sequence portion
  source 1..22: mol_type = other RNA
tcttctctgcctgccgttccga

SEQ ID NO: 18003 - RNA, 22 nt, synthetic construct
  misc_feature 1..22: note = HBV-targeting guide sequence portion
  source 1..22: mol_type = other RNA
tcttctgcgacgcggcgattga

SEQ ID NO: 18004 - RNA, 22 nt, synthetic construct
  misc_feature 1..22: note = HBV-targeting guide sequence portion
  source 1..22: mol_type = other RNA
tcttctggactatcaaggtatg

SEQ ID NO: 18005 - RNA, 22 nt, synthetic construct
  misc_feature 1..22: note = HBV-targeting guide sequence portion
  source 1..22: mol_type = other RNA
tcttctgggttttgctgcccct

SEQ ID NO: 18006 - RNA, 22 nt, synthetic construct
  misc_feature 1..22: note = HBV-targeting guide sequence portion
  source 1..22: mol_type = other RNA
tcttcttctaggggacctgcct

SEQ ID NO: 18007 - RNA, 22 nt, synthetic construct
  misc_feature 1..22: note = HBV-targeting guide sequence portion
  source 1..22: mol_type = other RNA
tcttcttgttggttcttctgga

SEQ ID NO: 18008 - RNA, 22 nt, synthetic construct
  misc_feature 1..22: note = HBV-targeting guide sequence portion
  source 1..22: mol_type = other RNA
tcttgagtccctttataccgct

SEQ ID NO: 18009 - RNA, 22 nt, synthetic construct
  misc_feature 1..22: note = HBV-targeting guide sequence portion
  source 1..22: mol_type = other RNA
tcttgcagagtttggtggaagg

SEQ ID NO: 18010 - RNA, 22 nt, synthetic construct
  misc_feature 1..22: note = HBV-targeting guide sequence portion
  source 1..22: mol_type = other RNA
tcttgcccaaggtcttacataa

SEQ ID NO: 18011 - RNA, 22 nt, synthetic construct
  misc_feature 1..22: note = HBV-targeting guide sequence portion
  source 1..22: mol_type = other RNA
tcttggactctctgcaatgtca

SEQ ID NO: 18012 - RNA, 22 nt, synthetic construct
  misc_feature 1..22: note = HBV-targeting guide sequence portion
  source 1..22: mol_type = other RNA
tcttggccaaaattcgcagtcc

SEQ ID NO: 18013 - RNA, 22 nt, synthetic construct
  misc_feature 1..22: note = HBV-targeting guide sequence portion
  source 1..22: mol_type = other RNA
tcttggctcagtttactagtgc

SEQ ID NO: 18014 - RNA, 22 nt, synthetic construct
  misc_feature 1..22: note = HBV-targeting guide sequence portion
  source 1..22: mol_type = other RNA
tcttgggaacaagagctacagc

SEQ ID NO: 18015 - RNA, 22 nt, synthetic construct
  misc_feature 1..22: note = HBV-targeting guide sequence portion
  source 1..22: mol_type = other RNA
tcttggtgtagatgtatattag

SEQ ID NO: 18016 - RNA, 22 nt, synthetic construct
  misc_feature 1..22: note = HBV-targeting guide sequence portion
  source 1..22: mol_type = other RNA
tcttgtcaacaaggaaaacccc

SEQ ID NO: 18017 - RNA, 22 nt, synthetic construct
  misc_feature 1..22: note = HBV-targeting guide sequence portion
  source 1..22: mol_type = other RNA
tcttgtcttacttttggaagag

SEQ ID NO: 18018 - RNA, 22 nt, synthetic construct
  misc_feature 1..22: note = HBV-targeting guide sequence portion
  source 1..22: mol_type = other RNA
tcttgttcatgtcctactgttc

SEQ ID NO: 18019 - RNA, 22 nt, synthetic construct
  misc_feature 1..22: note = HBV-targeting guide sequence portion
  source 1..22: mol_type = other RNA
tcttgttcccaagaatatggtg

SEQ ID NO: 18020 - RNA, 22 nt, synthetic construct
  misc_feature 1..22: note = HBV-targeting guide sequence portion
  source 1..22: mol_type = other RNA
tcttgttggttcttctggacta

SEQ ID NO: 18021 - RNA, 22 nt, synthetic construct
  misc_feature 1..22: note = HBV-targeting guide sequence portion
  source 1..22: mol_type = other RNA
tctttaaacaaacagtctttga

SEQ ID NO: 18022 - RNA, 22 nt, synthetic construct
  misc_feature 1..22: note = HBV-targeting guide sequence portion
  source 1..22: mol_type = other RNA
tctttaaccctcattggaaaac

SEQ ID NO: 18023 - RNA, 22 nt, synthetic construct
  misc_feature 1..22: note = HBV-targeting guide sequence portion
  source 1..22: mol_type = other RNA
tctttacgcggactccccgtct

SEQ ID NO: 18024 - RNA, 22 nt, synthetic construct
  misc_feature 1..22: note = HBV-targeting guide sequence portion
  source 1..22: mol_type = other RNA
tctttatatgggtcaatgtcca

SEQ ID NO: 18025 - RNA, 22 nt, synthetic construct
  misc_feature 1..22: note = HBV-targeting guide sequence portion
  source 1..22: mol_type = other RNA
tctttccaccagcaatcctctg

SEQ ID NO: 18026 - RNA, 22 nt, synthetic construct
  misc_feature 1..22: note = HBV-targeting guide sequence portion
  source 1..22: mol_type = other RNA
tctttcccgaccaccagttgga

SEQ ID NO: 18027 - RNA, 22 nt, synthetic construct
  misc_feature 1..22: note = HBV-targeting guide sequence portion
  source 1..22: mol_type = other RNA
tctttccttccgtacgagatct

SEQ ID NO: 18028 - RNA, 22 nt, synthetic construct
  misc_feature 1..22: note = HBV-targeting guide sequence portion
  source 1..22: mol_type = other RNA
tctttgaagtatgcctcaaggt

SEQ ID NO: 18029 - RNA, 22 nt, synthetic construct
  misc_feature 1..22: note = HBV-targeting guide sequence portion
  source 1..22: mol_type = other RNA
tctttgattttgtgtatgatgt

SEQ ID NO: 18030 - RNA, 22 nt, synthetic construct
  misc_feature 1..22: note = HBV-targeting guide sequence portion
  source 1..22: mol_type = other RNA
tctttgctggggagaactaatg

SEQ ID NO: 18031 - RNA, 22 nt, synthetic construct
  misc_feature 1..22: note = HBV-targeting guide sequence portion
  source 1..22: mol_type = other RNA
tctttgggtgtacatttaaacc

SEQ ID NO: 18032 - RNA, 22 nt, synthetic construct
  misc_feature 1..22: note = HBV-targeting guide sequence portion
  source 1..22: mol_type = other RNA
tctttgtactaggaggctgtag

SEQ ID NO: 18033 - RNA, 22 nt, synthetic construct
  misc_feature 1..22: note = HBV-targeting guide sequence portion
  source 1..22: mol_type = other RNA
tctttgttttgttagggtttaa

SEQ ID NO: 18034 - RNA, 22 nt, synthetic construct
  misc_feature 1..22: note = HBV-targeting guide sequence portion
  source 1..22: mol_type = other RNA
tcttttcctaatatacatctac

SEQ ID NO: 18035 - RNA, 22 nt, synthetic construct
  misc_feature 1..22: note = HBV-targeting guide sequence portion
  source 1..22: mol_type = other RNA
tcttttctcattaactgtaagc

SEQ ID NO: 18036 - RNA, 22 nt, synthetic construct
  misc_feature 1..22: note = HBV-targeting guide sequence portion
  source 1..22: mol_type = other RNA
tcttttggagtgtggattcgca

SEQ ID NO: 18037 - RNA, 22 nt, synthetic construct
  misc_feature 1..22: note = HBV-targeting guide sequence portion
  source 1..22: mol_type = other RNA
tcttttgtctttgggtgtacat

SEQ ID NO: 18038 - RNA, 22 nt, synthetic construct
  misc_feature 1..22: note = HBV-targeting guide sequence portion
  source 1..22: mol_type = other RNA
tgaaaaagttgcatggtgctgg

SEQ ID NO: 18039 - RNA, 22 nt, synthetic construct
  misc_feature 1..22: note = HBV-targeting guide sequence portion
  source 1..22: mol_type = other RNA
tgaaacattctttgattttgtg

SEQ ID NO: 18040 - RNA, 22 nt, synthetic construct
  misc_feature 1..22: note = HBV-targeting guide sequence portion
  source 1..22: mol_type = other RNA
tgaaaccacaatagttgtctga

SEQ ID NO: 18041 - RNA, 22 nt, synthetic construct
  misc_feature 1..22: note = HBV-targeting guide sequence portion
  source 1..22: mol_type = other RNA
tgaaagccaaacagtgggggaa

SEQ ID NO: 18042 - RNA, 22 nt, synthetic construct
  misc_feature 1..22: note = HBV-targeting guide sequence portion
  source 1..22: mol_type = other RNA
tgaaagcctgcttagattgaat

SEQ ID NO: 18043 - RNA, 22 nt, synthetic construct
  misc_feature 1..22: note = HBV-targeting guide sequence portion
  source 1..22: mol_type = other RNA
tgaaattaagagaataacccca

SEQ ID NO: 18044 - RNA, 22 nt, synthetic construct
  misc_feature 1..22: note = HBV-targeting guide sequence portion
  source 1..22: mol_type = other RNA
tgaaattgattatgcctgctag

SEQ ID NO: 18045 - RNA, 22 nt, synthetic construct
  misc_feature 1..22: note = HBV-targeting guide sequence portion
  source 1..22: mol_type = other RNA
tgaacaaatggcactagtaaac

SEQ ID NO: 18046 - RNA, 22 nt, synthetic construct
  misc_feature 1..22: note = HBV-targeting guide sequence portion
  source 1..22: mol_type = other RNA
tgaacaagagatgattaggcag

SEQ ID NO: 18047 - RNA, 22 nt, synthetic construct
  misc_feature 1..22: note = HBV-targeting guide sequence portion
  source 1..22: mol_type = other RNA
tgaacaatgctcaggagactcc

SEQ ID NO: 18048 - RNA, 22 nt, synthetic construct
  misc_feature 1..22: note = HBV-targeting guide sequence portion
  source 1..22: mol_type = other RNA
tgaacagtaggacatgaacaag

SEQ ID NO: 18049 - RNA, 22 nt, synthetic construct
  misc_feature 1..22: note = HBV-targeting guide sequence portion
  source 1..22: mol_type = other RNA
tgaacagtttgtaggcccgctt

SEQ ID NO: 18050 - RNA, 22 nt, synthetic construct
  misc_feature 1..22: note = HBV-targeting guide sequence portion
  source 1..22: mol_type = other RNA
tgaacatggagaacatcacatc

SEQ ID NO: 18051 - RNA, 22 nt, synthetic construct
  misc_feature 1..22: note = HBV-targeting guide sequence portion
  source 1..22: mol_type = other RNA
tgaaccctagcccgaatgctcc

SEQ ID NO: 18052 - RNA, 22 nt, synthetic construct
  misc_feature 1..22: note = HBV-targeting guide sequence portion
  source 1..22: mol_type = other RNA
tgaacctttaccccgttgccag

SEQ ID NO: 18053 - RNA, 22 nt, synthetic construct
  misc_feature 1..22: note = HBV-targeting guide sequence portion
  source 1..22: mol_type = other RNA
tgaacgcccaccaattcttgcc

SEQ ID NO: 18054 - RNA, 22 nt, synthetic construct
  misc_feature 1..22: note = HBV-targeting guide sequence portion
  source 1..22: mol_type = other RNA
tgaactggagccaccagcaggg

SEQ ID NO: 18055 - RNA, 22 nt, synthetic construct
  misc_feature 1..22: note = HBV-targeting guide sequence portion
  source 1..22: mol_type = other RNA
tgaactttaggcccatatgagt

SEQ ID NO: 18056 - RNA, 22 nt, synthetic construct
  misc_feature 1..22: note = HBV-targeting guide sequence portion
  source 1..22: mol_type = other RNA
tgaagaggaagatgataaaacg

SEQ ID NO: 18057 - RNA, 22 nt, synthetic construct
  misc_feature 1..22: note = HBV-targeting guide sequence portion
  source 1..22: mol_type = other RNA
tgaagcgaagtgcacacggtcc

SEQ ID NO: 18058 - RNA, 22 nt, synthetic construct
  misc_feature 1..22: note = HBV-targeting guide sequence portion
  source 1..22: mol_type = other RNA
tgaaggctgggtccaactggtg

SEQ ID NO: 18059 - RNA, 22 nt, synthetic construct
  misc_feature 1..22: note = HBV-targeting guide sequence portion
  source 1..22: mol_type = other RNA
tgaagtatgcctcaaggtcggt

SEQ ID NO: 18060 - RNA, 22 nt, synthetic construct
  misc_feature 1..22: note = HBV-targeting guide sequence portion
  source 1..22: mol_type = other RNA
tgaagtcccaatctggattgtt

SEQ ID NO: 18061 - RNA, 22 nt, synthetic construct
  misc_feature 1..22: note = HBV-targeting guide sequence portion
  source 1..22: mol_type = other RNA
tgaatacatgcatacaagggca

SEQ ID NO: 18062 - RNA, 22 nt, synthetic construct
  misc_feature 1..22: note = HBV-targeting guide sequence portion
  source 1..22: mol_type = other RNA
tgaatcccgcggacgacccatc

SEQ ID NO: 18063 - RNA, 22 nt, synthetic construct
  misc_feature 1..22: note = HBV-targeting guide sequence portion
  source 1..22: mol_type = other RNA
tgaatttaggataaaacctagc

SEQ ID NO: 18064 - RNA, 22 nt, synthetic construct
  misc_feature 1..22: note = HBV-targeting guide sequence portion
  source 1..22: mol_type = other RNA
tgacaactctgttgtcctctcc

SEQ ID NO: 18065 - RNA, 22 nt, synthetic construct
  misc_feature 1..22: note = HBV-targeting guide sequence portion
  source 1..22: mol_type = other RNA
tgacaagaatcctcacaatacc

SEQ ID NO: 18066 - RNA, 22 nt, synthetic construct
  misc_feature 1..22: note = HBV-targeting guide sequence portion
  source 1..22: mol_type = other RNA
tgacacactttccaatcaatag

SEQ ID NO: 18067 - RNA, 22 nt, synthetic construct
  misc_feature 1..22: note = HBV-targeting guide sequence portion
  source 1..22: mol_type = other RNA
tgacactctcttatataaaaca

SEQ ID NO: 18068 - RNA, 22 nt, synthetic construct
  misc_feature 1..22: note = HBV-targeting guide sequence portion
  source 1..22: mol_type = other RNA
tgacataactgactactaggtc

SEQ ID NO: 18069 - RNA, 22 nt, synthetic construct
  misc_feature 1..22: note = HBV-targeting guide sequence portion
  source 1..22: mol_type = other RNA
tgacatagcccatgaaattaag

SEQ ID NO: 18070 - RNA, 22 nt, synthetic construct
  misc_feature 1..22: note = HBV-targeting guide sequence portion
  source 1..22: mol_type = other RNA
tgacattgcagagagtccaaga

SEQ ID NO: 18071 - RNA, 22 nt, synthetic construct
  misc_feature 1..22: note = HBV-targeting guide sequence portion
  source 1..22: mol_type = other RNA
tgaccaagccccaaccagtggg

SEQ ID NO: 18072 - RNA, 22 nt, synthetic construct
  misc_feature 1..22: note = HBV-targeting guide sequence portion
  source 1..22: mol_type = other RNA
tgacccacagaatgaggcgcta

SEQ ID NO: 18073 - RNA, 22 nt, synthetic construct
  misc_feature 1..22: note = HBV-targeting guide sequence portion
  source 1..22: mol_type = other RNA
tgacccatataaagaatttgga

SEQ ID NO: 18074 - RNA, 22 nt, synthetic construct
  misc_feature 1..22: note = HBV-targeting guide sequence portion
  source 1..22: mol_type = other RNA
tgacgatatgtgagaggcagta

SEQ ID NO: 18075 - RNA, 22 nt, synthetic construct
  misc_feature 1..22: note = HBV-targeting guide sequence portion
  source 1..22: mol_type = other RNA
tgactactaggtccctagatgc

SEQ ID NO: 18076 - RNA, 22 nt, synthetic construct
  misc_feature 1..22: note = HBV-targeting guide sequence portion
  source 1..22: mol_type = other RNA
tgactctagctacctgggtggg

SEQ ID NO: 18077 - RNA, 22 nt, synthetic construct
  misc_feature 1..22: note = HBV-targeting guide sequence portion
  source 1..22: mol_type = other RNA
tgactggcgattggtagaggca

SEQ ID NO: 18078 - RNA, 22 nt, synthetic construct
  misc_feature 1..22: note = HBV-targeting guide sequence portion
  source 1..22: mol_type = other RNA
tgacttctttccttccgtacga

SEQ ID NO: 18079 - RNA, 22 nt, synthetic construct
  misc_feature 1..22: note = HBV-targeting guide sequence portion
  source 1..22: mol_type = other RNA
tgagaaaagacggttgaaattg

SEQ ID NO: 18080 - RNA, 22 nt, synthetic construct
  misc_feature 1..22: note = HBV-targeting guide sequence portion
  source 1..22: mol_type = other RNA
tgagaaacactcatcctcaggc

SEQ ID NO: 18081 - RNA, 22 nt, synthetic construct
  misc_feature 1..22: note = HBV-targeting guide sequence portion
  source 1..22: mol_type = other RNA
tgagaaggcacagacggggagt

SEQ ID NO: 18082 - RNA, 22 nt, synthetic construct
  misc_feature 1..22: note = HBV-targeting guide sequence portion
  source 1..22: mol_type = other RNA
tgagagaagtccaccacgagtc

SEQ ID NO: 18083 - RNA, 22 nt, synthetic construct
  misc_feature 1..22: note = HBV-targeting guide sequence portion
  source 1..22: mol_type = other RNA
tgagaggcagtagtcggaacag

SEQ ID NO: 18084 - RNA, 22 nt, synthetic construct
  misc_feature 1..22: note = HBV-targeting guide sequence portion
  source 1..22: mol_type = other RNA
tgagaggcctgtatctccctgc

SEQ ID NO: 18085 - RNA, 22 nt, synthetic construct
  misc_feature 1..22: note = HBV-targeting guide sequence portion
  source 1..22: mol_type = other RNA
tgagatccccgagattgagatc

SEQ ID NO: 18086 - RNA, 22 nt, synthetic construct
  misc_feature 1..22: note = HBV-targeting guide sequence portion
  source 1..22: mol_type = other RNA
tgagatcttcgtctgcgaggcg

SEQ ID NO: 18087 - RNA, 22 nt, synthetic construct
  misc_feature 1..22: note = HBV-targeting guide sequence portion
  source 1..22: mol_type = other RNA
tgagatcttctgcgacgcggcg

SEQ ID NO: 18088 - RNA, 22 nt, synthetic construct
  misc_feature 1..22: note = HBV-targeting guide sequence portion
  source 1..22: mol_type = other RNA
tgagcaggagtcgtgcaggttc

SEQ ID NO: 18089 - RNA, 22 nt, synthetic construct
  misc_feature 1..22: note = HBV-targeting guide sequence portion
  source 1..22: mol_type = other RNA
tgagcattgttcacctcaccat

SEQ ID NO: 18090 - RNA, 22 nt, synthetic construct
  misc_feature 1..22: note = HBV-targeting guide sequence portion
  source 1..22: mol_type = other RNA
tgagccaagagaaacgggctga

SEQ ID NO: 18091 - RNA, 22 nt, synthetic construct
  misc_feature 1..22: note = HBV-targeting guide sequence portion
  source 1..22: mol_type = other RNA
tgagcctgagggctccacccca

SEQ ID NO: 18092 - RNA, 22 nt, synthetic construct
  misc_feature 1..22: note = HBV-targeting guide sequence portion
  source 1..22: mol_type = other RNA
tgaggatgagtgtttctcagag

SEQ ID NO: 18093 - RNA, 22 nt, synthetic construct
  misc_feature 1..22: note = HBV-targeting guide sequence portion
  source 1..22: mol_type = other RNA
tgaggattcttgtcaacaagga

SEQ ID NO: 18094 - RNA, 22 nt, synthetic construct
  misc_feature 1..22: note = HBV-targeting guide sequence portion
  source 1..22: mol_type = other RNA
tgaggcatacttcaaagactgt

SEQ ID NO: 18095 - RNA, 22 nt, synthetic construct
  misc_feature 1..22: note = HBV-targeting guide sequence portion
  source 1..22: mol_type = other RNA
tgaggcatagcagcaggatgaa

SEQ ID NO: 18096 - RNA, 22 nt, synthetic construct
  misc_feature 1..22: note = HBV-targeting guide sequence portion
  source 1..22: mol_type = other RNA
tgaggcccactcccataggaat

SEQ ID NO: 18097 - RNA, 22 nt, synthetic construct
  misc_feature 1..22: note = HBV-targeting guide sequence portion
  source 1..22: mol_type = other RNA
tgaggcgctatgtgttgacact

SEQ ID NO: 18098 - RNA, 22 nt, synthetic construct
  misc_feature 1..22: note = HBV-targeting guide sequence portion
  source 1..22: mol_type = other RNA
tgagggctccaccccaaaaggc

SEQ ID NO: 18099 - RNA, 22 nt, synthetic construct
  misc_feature 1..22: note = HBV-targeting guide sequence portion
  source 1..22: mol_type = other RNA
tgagggttaaagacaggtacag

SEQ ID NO: 18100 - RNA, 22 nt, synthetic construct
  misc_feature 1..22: note = HBV-targeting guide sequence portion
  source 1..22: mol_type = other RNA
tgaggtgaacaatgctcaggag

SEQ ID NO: 18101 - RNA, 22 nt, synthetic construct
  misc_feature 1..22: note = HBV-targeting guide sequence portion
  source 1..22: mol_type = other RNA
tgagtccaagggatactaacat

SEQ ID NO: 18102 - RNA, 22 nt, synthetic construct
  misc_feature 1..22: note = HBV-targeting guide sequence portion
  source 1..22: mol_type = other RNA
tgagtccctttataccgctgtt

SEQ ID NO: 18103 - RNA, 22 nt, synthetic construct
  misc_feature 1..22: note = HBV-targeting guide sequence portion
  source 1..22: mol_type = other RNA
tgagtgattggaggttggggac

SEQ ID NO: 18104 - RNA, 22 nt, synthetic construct
  misc_feature 1..22: note = HBV-targeting guide sequence portion
  source 1..22: mol_type = other RNA
tgagtgcagtatggtgaggtga

SEQ ID NO: 18105 - RNA, 22 nt, synthetic construct
  misc_feature 1..22: note = HBV-targeting guide sequence portion
  source 1..22: mol_type = other RNA
tgagtgttgacataactgacta

SEQ ID NO: 18106 - RNA, 22 nt, synthetic construct
  misc_feature 1..22: note = HBV-targeting guide sequence portion
  source 1..22: mol_type = other RNA
tgagtgtttctcagaggtggag

SEQ ID NO: 18107 - RNA, 22 nt, synthetic construct
  misc_feature 1..22: note = HBV-targeting guide sequence portion
  source 1..22: mol_type = other RNA
tgataaaacgccgcagacacat

SEQ ID NO: 18108 - RNA, 22 nt, synthetic construct
  misc_feature 1..22: note = HBV-targeting guide sequence portion
  source 1..22: mol_type = other RNA
tgataatatcttggtgtagatg

SEQ ID NO: 18109 - RNA, 22 nt, synthetic construct
  misc_feature 1..22: note = HBV-targeting guide sequence portion
  source 1..22: mol_type = other RNA
tgataggataggggcatttggt

SEQ ID NO: 18110 - RNA, 22 nt, synthetic construct
  misc_feature 1..22: note = HBV-targeting guide sequence portion
  source 1..22: mol_type = other RNA
tgatagtccagaagaaccaaca

SEQ ID NO: 18111 - RNA, 22 nt, synthetic construct
  misc_feature 1..22: note = HBV-targeting guide sequence portion
  source 1..22: mol_type = other RNA
tgatccccaacaatcaatgaca

SEQ ID NO: 18112 - RNA, 22 nt, synthetic construct
  misc_feature 1..22: note = HBV-targeting guide sequence portion
  source 1..22: mol_type = other RNA
tgatcctggaattagaggacag

SEQ ID NO: 18113 - RNA, 22 nt, synthetic construct
  misc_feature 1..22: note = HBV-targeting guide sequence portion
  source 1..22: mol_type = other RNA
tgatcttctaaattagtaccca

SEQ ID NO: 18114 - RNA, 22 nt, synthetic construct
  misc_feature 1..22: note = HBV-targeting guide sequence portion
  source 1..22: mol_type = other RNA
tgatctttgtactaggaggctg

SEQ ID NO: 18115 - RNA, 22 nt, synthetic construct
  misc_feature 1..22: note = HBV-targeting guide sequence portion
  source 1..22: mol_type = other RNA
tgatgatcctggaattagagga

SEQ ID NO: 18116 - RNA, 22 nt, synthetic construct
  misc_feature 1..22: note = HBV-targeting guide sequence portion
  source 1..22: mol_type = other RNA
tgatgcaacccccactggttgg

SEQ ID NO: 18117 - RNA, 22 nt, synthetic construct
  misc_feature 1..22: note = HBV-targeting guide sequence portion
  source 1..22: mol_type = other RNA
tgatggcctatgaccaagcccc

SEQ ID NO: 18118 - RNA, 22 nt, synthetic construct
  misc_feature 1..22: note = HBV-targeting guide sequence portion
  source 1..22: mol_type = other RNA
tgatgggatgggaatacaggtg

SEQ ID NO: 18119 - RNA, 22 nt, synthetic construct
  misc_feature 1..22: note = HBV-targeting guide sequence portion
  source 1..22: mol_type = other RNA
tgatgtgatgttctccatgttc

SEQ ID NO: 18120 - RNA, 22 nt, synthetic construct
  misc_feature 1..22: note = HBV-targeting guide sequence portion
  source 1..22: mol_type = other RNA
tgatgtgattttgtggcaatga

SEQ ID NO: 18121 - RNA, 22 nt, synthetic construct
  misc_feature 1..22: note = HBV-targeting guide sequence portion
  source 1..22: mol_type = other RNA
tgatgtggtattgggggccaag

SEQ ID NO: 18122 - RNA, 22 nt, synthetic construct
  misc_feature 1..22: note = HBV-targeting guide sequence portion
  source 1..22: mol_type = other RNA
tgatgttctccatgttcagcgc

SEQ ID NO: 18123 - RNA, 22 nt, synthetic construct
  misc_feature 1..22: note = HBV-targeting guide sequence portion
  source 1..22: mol_type = other RNA
tgattaactagatgttctggat

SEQ ID NO: 18124 - RNA, 22 nt, synthetic construct
  misc_feature 1..22: note = HBV-targeting guide sequence portion
  source 1..22: mol_type = other RNA
tgattaggcagaggtgaaaaag

SEQ ID NO: 18125 - RNA, 22 nt, synthetic construct
  misc_feature 1..22: note = HBV-targeting guide sequence portion
  source 1..22: mol_type = other RNA
tgattatgcctgctaggtttta

SEQ ID NO: 18126 - RNA, 22 nt, synthetic construct
  misc_feature 1..22: note = HBV-targeting guide sequence portion
  source 1..22: mol_type = other RNA
tgattggaaagtgtgtcaacga

SEQ ID NO: 18127 - RNA, 22 nt, synthetic construct
  misc_feature 1..22: note = HBV-targeting guide sequence portion
  source 1..22: mol_type = other RNA
tgattggaggttggggactgcg

SEQ ID NO: 18128 - RNA, 22 nt, synthetic construct
  misc_feature 1..22: note = HBV-targeting guide sequence portion
  source 1..22: mol_type = other RNA
tgattgttggggatcattgcca

SEQ ID NO: 18129 - RNA, 22 nt, synthetic construct
  misc_feature 1..22: note = HBV-targeting guide sequence portion
  source 1..22: mol_type = other RNA
tgattttgtggcaatgatcccc

SEQ ID NO: 18130 - RNA, 22 nt, synthetic construct
  misc_feature 1..22: note = HBV-targeting guide sequence portion
  source 1..22: mol_type = other RNA
tgattttgtgtatgatgtgatt

SEQ ID NO: 18131 - RNA, 22 nt, synthetic construct
  misc_feature 1..22: note = HBV-targeting guide sequence portion
  source 1..22: mol_type = other RNA
tgcaaaccttgccagcaaatcc

SEQ ID NO: 18132 - RNA, 22 nt, synthetic construct
  misc_feature 1..22: note = HBV-targeting guide sequence portion
  source 1..22: mol_type = other RNA
tgcaacccccactggttggggc

SEQ ID NO: 18133 - RNA, 22 nt, synthetic construct
  misc_feature 1..22: note = HBV-targeting guide sequence portion
  source 1..22: mol_type = other RNA
tgcaactttttcacctctgcct

SEQ ID NO: 18134 - RNA, 22 nt, synthetic construct
  misc_feature 1..22: note = HBV-targeting guide sequence portion
  source 1..22: mol_type = other RNA
tgcaagatcccagagtgagagg

SEQ ID NO: 18135 - RNA, 22 nt, synthetic construct
  misc_feature 1..22: note = HBV-targeting guide sequence portion
  source 1..22: mol_type = other RNA
tgcaatgtcaacgaccgacctt

SEQ ID NO: 18136 - RNA, 22 nt, synthetic construct
  misc_feature 1..22: note = HBV-targeting guide sequence portion
  source 1..22: mol_type = other RNA
tgcacacggtccggcagatgag

SEQ ID NO: 18137 - RNA, 22 nt, synthetic construct
  misc_feature 1..22: note = HBV-targeting guide sequence portion
  source 1..22: mol_type = other RNA
tgcacctgtattcccatcccat

SEQ ID NO: 18138 - RNA, 22 nt, synthetic construct
  misc_feature 1..22: note = HBV-targeting guide sequence portion
  source 1..22: mol_type = other RNA
tgcacgactcctgctcaaggaa

SEQ ID NO: 18139 - RNA, 22 nt, synthetic construct
  misc_feature 1..22: note = HBV-targeting guide sequence portion
  source 1..22: mol_type = other RNA
tgcacgtcgcatggagaccacc

SEQ ID NO: 18140 - RNA, 22 nt, synthetic construct
  misc_feature 1..22: note = HBV-targeting guide sequence portion
  source 1..22: mol_type = other RNA
tgcactcaggcaagcaattctt

SEQ ID NO: 18141 - RNA, 22 nt, synthetic construct
  misc_feature 1..22: note = HBV-targeting guide sequence portion
  source 1..22: mol_type = other RNA
tgcacttcgcttcacctctgca

SEQ ID NO: 18142 - RNA, 22 nt, synthetic construct
  misc_feature 1..22: note = HBV-targeting guide sequence portion
  source 1..22: mol_type = other RNA
tgcagaacctgcacgactcctg

SEQ ID NO: 18143 - RNA, 22 nt, synthetic construct
  misc_feature 1..22: note = HBV-targeting guide sequence portion
  source 1..22: mol_type = other RNA
tgcagagagtccaagagtcctc

SEQ ID NO: 18144 - RNA, 22 nt, synthetic construct
  misc_feature 1..22: note = HBV-targeting guide sequence portion
  source 1..22: mol_type = other RNA
tgcagaggtgaagcgaagtgca

SEQ ID NO: 18145 - RNA, 22 nt, synthetic construct
  misc_feature 1..22: note = HBV-targeting guide sequence portion
  source 1..22: mol_type = other RNA
tgcagagtttggtggaaggttg

SEQ ID NO: 18146 - RNA, 22 nt, synthetic construct
  misc_feature 1..22: note = HBV-targeting guide sequence portion
  source 1..22: mol_type = other RNA
tgcagggtcccgtgctggtggt

SEQ ID NO: 18147 - RNA, 22 nt, synthetic construct
  misc_feature 1..22: note = HBV-targeting guide sequence portion
  source 1..22: mol_type = other RNA
tgcaggttctgcagggtcccgt

SEQ ID NO: 18148 - RNA, 22 nt, synthetic construct
  misc_feature 1..22: note = HBV-targeting guide sequence portion
  source 1..22: mol_type = other RNA
tgcagtatggtgaggtgaacaa

SEQ ID NO: 18149 - RNA, 22 nt, synthetic construct
  misc_feature 1..22: note = HBV-targeting guide sequence portion
  source 1..22: mol_type = other RNA
tgcagtttccatccgaaggttt

SEQ ID NO: 18150 - RNA, 22 nt, synthetic construct
  misc_feature 1..22: note = HBV-targeting guide sequence portion
  source 1..22: mol_type = other RNA
tgcatacaagggcattaaagca

SEQ ID NO: 18151 - RNA, 22 nt, synthetic construct
  misc_feature 1..22: note = HBV-targeting guide sequence portion
  source 1..22: mol_type = other RNA
tgcatcagcaaacacttggcac

SEQ ID NO: 18152 - RNA, 22 nt, synthetic construct
  misc_feature 1..22: note = HBV-targeting guide sequence portion
  source 1..22: mol_type = other RNA
tgcatggcctgaggatgagtgt

SEQ ID NO: 18153 - RNA, 22 nt, synthetic construct
  misc_feature 1..22: note = HBV-targeting guide sequence portion
  source 1..22: mol_type = other RNA
tgcatggtgctggtgcgcagac

SEQ ID NO: 18154 - RNA, 22 nt, synthetic construct
  misc_feature 1..22: note = HBV-targeting guide sequence portion
  source 1..22: mol_type = other RNA
tgcatgtattcaatctaagcag

SEQ ID NO: 18155 - RNA, 22 nt, synthetic construct
  misc_feature 1..22: note = HBV-targeting guide sequence portion
  source 1..22: mol_type = other RNA
tgcattatgccctgagcctgag

SEQ ID NO: 18156 - RNA, 22 nt, synthetic construct
  misc_feature 1..22: note = HBV-targeting guide sequence portion
  source 1..22: mol_type = other RNA
tgccaactggatcctgcgcggg

SEQ ID NO: 18157 - RNA, 22 nt, synthetic construct
  misc_feature 1..22: note = HBV-targeting guide sequence portion
  source 1..22: mol_type = other RNA
tgccaagtgtttgctgatgcaa

SEQ ID NO: 18158 - RNA, 22 nt, synthetic construct
  misc_feature 1..22: note = HBV-targeting guide sequence portion
  source 1..22: mol_type = other RNA
tgccacaaaatcacatcataca

SEQ ID NO: 18159 - RNA, 22 nt, synthetic construct
  misc_feature 1..22: note = HBV-targeting guide sequence portion
  source 1..22: mol_type = other RNA
tgccagcaaatccgcctcctgc

SEQ ID NO: 18160 - RNA, 22 nt, synthetic construct
  misc_feature 1..22: note = HBV-targeting guide sequence portion
  source 1..22: mol_type = other RNA
tgccaggcaacggccaggtctg

SEQ ID NO: 18161 - RNA, 22 nt, synthetic construct
  misc_feature 1..22: note = HBV-targeting guide sequence portion
  source 1..22: mol_type = other RNA
tgccatttgttcagtggttcgt

SEQ ID NO: 18162 - RNA, 22 nt, synthetic construct
  misc_feature 1..22: note = HBV-targeting guide sequence portion
  source 1..22: mol_type = other RNA
tgcccaaggtcttacataagag

SEQ ID NO: 18163 - RNA, 22 nt, synthetic construct
  misc_feature 1..22: note = HBV-targeting guide sequence portion
  source 1..22: mol_type = other RNA
tgccccatgctgtagctcttgt

SEQ ID NO: 18164 - RNA, 22 nt, synthetic construct
  misc_feature 1..22: note = HBV-targeting guide sequence portion
  source 1..22: mol_type = other RNA
tgcccctatcctatcaacactt

SEQ ID NO: 18165 - RNA, 22 nt, synthetic construct
  misc_feature 1..22: note = HBV-targeting guide sequence portion
  source 1..22: mol_type = other RNA
tgccccttttacacaatgtggt

SEQ ID NO: 18166 - RNA, 22 nt, synthetic construct
  misc_feature 1..22: note = HBV-targeting guide sequence portion
  source 1..22: mol_type = other RNA
tgccctaaagccacccaaggca

SEQ ID NO: 18167 - RNA, 22 nt, synthetic construct
  misc_feature 1..22: note = HBV-targeting guide sequence portion
  source 1..22: mol_type = other RNA
tgccctgagcctgagggctcca

SEQ ID NO: 18168 - RNA, 22 nt, synthetic construct
  misc_feature 1..22: note = HBV-targeting guide sequence portion
  source 1..22: mol_type = other RNA
tgcccttggataagggtattaa

SEQ ID NO: 18169 - RNA, 22 nt, synthetic construct
  misc_feature 1..22: note = HBV-targeting guide sequence portion
  source 1..22: mol_type = other RNA
tgcccttgtatgcatgtattca

SEQ ID NO: 18170 - RNA, 22 nt, synthetic construct
  misc_feature 1..22: note = HBV-targeting guide sequence portion
  source 1..22: mol_type = other RNA
tgccgatccatactgcggaact

SEQ ID NO: 18171 - RNA, 22 nt, synthetic construct
  misc_feature 1..22: note = HBV-targeting guide sequence portion
  source 1..22: mol_type = other RNA
tgccggaccgtgtgcacttcgc

SEQ ID NO: 18172 - RNA, 22 nt, synthetic construct
  misc_feature 1..22: note = HBV-targeting guide sequence portion
  source 1..22: mol_type = other RNA
tgccgtcctgactggcgattgg

SEQ ID NO: 18173 - RNA, 22 nt, synthetic construct
  misc_feature 1..22: note = HBV-targeting guide sequence portion
  source 1..22: mol_type = other RNA
tgccgttccgaccgaccacggg

SEQ ID NO: 18174 - RNA, 22 nt, synthetic construct
  misc_feature 1..22: note = HBV-targeting guide sequence portion
  source 1..22: mol_type = other RNA
tgcctaatcatctcttgttcat

SEQ ID NO: 18175 - RNA, 22 nt, synthetic construct
  misc_feature 1..22: note = HBV-targeting guide sequence portion
  source 1..22: mol_type = other RNA
tgcctacagcctcctagtacaa

SEQ ID NO: 18176 - RNA, 22 nt, synthetic construct
  misc_feature 1..22: note = HBV-targeting guide sequence portion
  source 1..22: mol_type = other RNA
tgcctcaaggtcggtcgttgac

SEQ ID NO: 18177 - RNA, 22 nt, synthetic construct
  misc_feature 1..22: note = HBV-targeting guide sequence portion
  source 1..22: mol_type = other RNA
tgcctcatcttcttgttggttc

SEQ ID NO: 18178 - RNA, 22 nt, synthetic construct
  misc_feature 1..22: note = HBV-targeting guide sequence portion
  source 1..22: mol_type = other RNA
tgcctcgtcgtctaacaacaca

SEQ ID NO: 18179 - RNA, 22 nt, synthetic construct
  misc_feature 1..22: note = HBV-targeting guide sequence portion
  source 1..22: mol_type = other RNA
tgcctctaccaatcgccagtca

SEQ ID NO: 18180 - RNA, 22 nt, synthetic construct
  misc_feature 1..22: note = HBV-targeting guide sequence portion
  source 1..22: mol_type = other RNA
tgcctctcacatatcgtcaatc

SEQ ID NO: 18181 - RNA, 22 nt, synthetic construct
  misc_feature 1..22: note = HBV-targeting guide sequence portion
  source 1..22: mol_type = other RNA
tgcctgagtgcagtatggtgag

SEQ ID NO: 18182 - RNA, 22 nt, synthetic construct
  misc_feature 1..22: note = HBV-targeting guide sequence portion
  source 1..22: mol_type = other RNA
tgcctgccgttccgaccgacca

SEQ ID NO: 18183 - RNA, 22 nt, synthetic construct
  misc_feature 1..22: note = HBV-targeting guide sequence portion
  source 1..22: mol_type = other RNA
tgcctgctaggttttatcctaa

SEQ ID NO: 18184 - RNA, 22 nt, synthetic construct
  misc_feature 1..22: note = HBV-targeting guide sequence portion
  source 1..22: mol_type = other RNA
tgcctggcaacggggtaaaggt

SEQ ID NO: 18185 - RNA, 22 nt, synthetic construct
  misc_feature 1..22: note = HBV-targeting guide sequence portion
  source 1..22: mol_type = other RNA
tgccttctcatctgccggaccg

SEQ ID NO: 18186 - RNA, 22 nt, synthetic construct
  misc_feature 1..22: note = HBV-targeting guide sequence portion
  source 1..22: mol_type = other RNA
tgccttctgacttctttccttc

SEQ ID NO: 18187 - RNA, 22 nt, synthetic construct
  misc_feature 1..22: note = HBV-targeting guide sequence portion
  source 1..22: mol_type = other RNA
tgccttggagtctcctgagcat

SEQ ID NO: 18188 - RNA, 22 nt, synthetic construct
  misc_feature 1..22: note = HBV-targeting guide sequence portion
  source 1..22: mol_type = other RNA
tgccttgggtggctttagggca

SEQ ID NO: 18189 - RNA, 22 nt, synthetic construct
  misc_feature 1..22: note = HBV-targeting guide sequence portion
  source 1..22: mol_type = other RNA
tgcgaatccacactccaaaaga

SEQ ID NO: 18190 - RNA, 22 nt, synthetic construct
  misc_feature 1..22: note = HBV-targeting guide sequence portion
  source 1..22: mol_type = other RNA
tgcgaattttggccaagacaca

SEQ ID NO: 18191 - RNA, 22 nt, synthetic construct
  misc_feature 1..22: note = HBV-targeting guide sequence portion
  source 1..22: mol_type = other RNA
tgcgacgcggcgattgagatct

SEQ ID NO: 18192 - RNA, 22 nt, synthetic construct
  misc_feature 1..22: note = HBV-targeting guide sequence portion
  source 1..22: mol_type = other RNA
tgcgacgtgcagaggtgaagcg

SEQ ID NO: 18193 - RNA, 22 nt, synthetic construct
  misc_feature 1..22: note = HBV-targeting guide sequence portion
  source 1..22: mol_type = other RNA
tgcgagcaaaacaagcggctag

SEQ ID NO: 18194 - RNA, 22 nt, synthetic construct
  misc_feature 1..22: note = HBV-targeting guide sequence portion
  source 1..22: mol_type = other RNA
tgcgaggcgagggagttcttct

SEQ ID NO: 18195 - RNA, 22 nt, synthetic construct
  misc_feature 1..22: note = HBV-targeting guide sequence portion
  source 1..22: mol_type = other RNA
tgcgcaccagcaccatgcaact

SEQ ID NO: 18196 - RNA, 22 nt, synthetic construct
  misc_feature 1..22: note = HBV-targeting guide sequence portion
  source 1..22: mol_type = other RNA
tgcgcagaccaatttatgccta

SEQ ID NO: 18197 - RNA, 22 nt, synthetic construct
  misc_feature 1..22: note = HBV-targeting guide sequence portion
  source 1..22: mol_type = other RNA
tgcgccccgtggtcggtcggaa

SEQ ID NO: 18198 - RNA, 22 nt, synthetic construct
  misc_feature 1..22: note = HBV-targeting guide sequence portion
  source 1..22: mol_type = other RNA
tgcgcgggacgtcctttgttta

SEQ ID NO: 18199 - RNA, 22 nt, synthetic construct
  misc_feature 1..22: note = HBV-targeting guide sequence portion
  source 1..22: mol_type = other RNA
tgcgctgaacatggagaacatc

SEQ ID NO: 18200 - RNA, 22 nt, synthetic construct
  misc_feature 1..22: note = HBV-targeting guide sequence portion
  source 1..22: mol_type = other RNA
tgcgctgatggcctatgaccaa

SEQ ID NO: 18201 - RNA, 22 nt, synthetic construct
  misc_feature 1..22: note = HBV-targeting guide sequence portion
  source 1..22: mol_type = other RNA
tgcggaactcctagccgcttgt

SEQ ID NO: 18202 - RNA, 22 nt, synthetic construct
  misc_feature 1..22: note = HBV-targeting guide sequence portion
  source 1..22: mol_type = other RNA
tgcggcggtatctagaagatct

SEQ ID NO: 18203 - RNA, 22 nt, synthetic construct
  misc_feature 1..22: note = HBV-targeting guide sequence portion
  source 1..22: mol_type = other RNA
tgcggcgttttatcatcttcct

SEQ ID NO: 18204 - RNA, 22 nt, synthetic construct
  misc_feature 1..22: note = HBV-targeting guide sequence portion
  source 1..22: mol_type = other RNA
tgcgggagaggacaacagagtt

SEQ ID NO: 18205 - RNA, 22 nt, synthetic construct
  misc_feature 1..22: note = HBV-targeting guide sequence portion
  source 1..22: mol_type = other RNA
tgcggtattgtgaggattcttg

SEQ ID NO: 18206 - RNA, 22 nt, synthetic construct
  misc_feature 1..22: note = HBV-targeting guide sequence portion
  source 1..22: mol_type = other RNA
tgcggtggggtgaaccctagcc

SEQ ID NO: 18207 - RNA, 22 nt, synthetic construct
  misc_feature 1..22: note = HBV-targeting guide sequence portion
  source 1..22: mol_type = other RNA
tgcgtggaacctttccggctcc

SEQ ID NO: 18208 - RNA, 22 nt, synthetic construct
  misc_feature 1..22: note = HBV-targeting guide sequence portion
  source 1..22: mol_type = other RNA
tgctaggctgtgctgccaactg

SEQ ID NO: 18209 - RNA, 22 nt, synthetic construct
  misc_feature 1..22: note = HBV-targeting guide sequence portion
  source 1..22: mol_type = other RNA
tgctaggttttatcctaaattc

SEQ ID NO: 18210 - RNA, 22 nt, synthetic construct
  misc_feature 1..22: note = HBV-targeting guide sequence portion
  source 1..22: mol_type = other RNA
tgctatgcctcatcttcttgtt

SEQ ID NO: 18211 - RNA, 22 nt, synthetic construct
  misc_feature 1..22: note = HBV-targeting guide sequence portion
  source 1..22: mol_type = other RNA
tgctcaaggaacctctatgtat

SEQ ID NO: 18212 - RNA, 22 nt, synthetic construct
  misc_feature 1..22: note = HBV-targeting guide sequence portion
  source 1..22: mol_type = other RNA
tgctcaggagactccaaggcat

SEQ ID NO: 18213 - RNA, 22 nt, synthetic construct
  misc_feature 1..22: note = HBV-targeting guide sequence portion
  source 1..22: mol_type = other RNA
tgctccagaccggctgcgagca

SEQ ID NO: 18214 - RNA, 22 nt, synthetic construct
  misc_feature 1..22: note = HBV-targeting guide sequence portion
  source 1..22: mol_type = other RNA
tgctccagctcctaccttgttg

SEQ ID NO: 18215 - RNA, 22 nt, synthetic construct
  misc_feature 1..22: note = HBV-targeting guide sequence portion
  source 1..22: mol_type = other RNA
tgctcgcagccggtctggagca

SEQ ID NO: 18216 - RNA, 22 nt, synthetic construct
  misc_feature 1..22: note = HBV-targeting guide sequence portion
  source 1..22: mol_type = other RNA
tgctcgtgttacaggcggggtt

SEQ ID NO: 18217 - RNA, 22 nt, synthetic construct
  misc_feature 1..22: note = HBV-targeting guide sequence portion
  source 1..22: mol_type = other RNA
tgctctgaaggctgggtccaac

SEQ ID NO: 18218 - RNA, 22 nt, synthetic construct
  misc_feature 1..22: note = HBV-targeting guide sequence portion
  source 1..22: mol_type = other RNA
tgctgatgcaacccccactggt

SEQ ID NO: 18219 - RNA, 22 nt, synthetic construct
  misc_feature 1..22: note = HBV-targeting guide sequence portion
  source 1..22: mol_type = other RNA
tgctgccaactggatcctgcgc

SEQ ID NO: 18220 - RNA, 22 nt, synthetic construct
  misc_feature 1..22: note = HBV-targeting guide sequence portion
  source 1..22: mol_type = other RNA
tgctgccccttttacacaatgt

SEQ ID NO: 18221 - RNA, 22 nt, synthetic construct
  misc_feature 1..22: note = HBV-targeting guide sequence portion
  source 1..22: mol_type = other RNA
tgctgctatgcctcatcttctt

SEQ ID NO: 18222 - RNA, 22 nt, synthetic construct
  misc_feature 1..22: note = HBV-targeting guide sequence portion
  source 1..22: mol_type = other RNA
tgctggcaaggtttgcattatg

SEQ ID NO: 18223 - RNA, 22 nt, synthetic construct
  misc_feature 1..22: note = HBV-targeting guide sequence portion
  source 1..22: mol_type = other RNA
tgctggggagaactaatgactc

SEQ ID NO: 18224 - RNA, 22 nt, synthetic construct
  misc_feature 1..22: note = HBV-targeting guide sequence portion
  source 1..22: mol_type = other RNA
tgctggtgcgcagaccaattta

SEQ ID NO: 18225 - RNA, 22 nt, synthetic construct
  misc_feature 1..22: note = HBV-targeting guide sequence portion
  source 1..22: mol_type = other RNA
tgctggtggaaagattctgccc

SEQ ID NO: 18226 - RNA, 22 nt, synthetic construct
  misc_feature 1..22: note = HBV-targeting guide sequence portion
  source 1..22: mol_type = other RNA
tgctggtggctccagttcagga

SEQ ID NO: 18227 - RNA, 22 nt, synthetic construct
  misc_feature 1..22: note = HBV-targeting guide sequence portion
  source 1..22: mol_type = other RNA
tgctggtggttgatgatcctgg

SEQ ID NO: 18228 - RNA, 22 nt, synthetic construct
  misc_feature 1..22: note = HBV-targeting guide sequence portion
  source 1..22: mol_type = other RNA
tgctgtacaaaaccttcggatg

SEQ ID NO: 18229 - RNA, 22 nt, synthetic construct
  misc_feature 1..22: note = HBV-targeting guide sequence portion
  source 1..22: mol_type = other RNA
tgctgtacagacttggccccca

SEQ ID NO: 18230 - RNA, 22 nt, synthetic construct
  misc_feature 1..22: note = HBV-targeting guide sequence portion
  source 1..22: mol_type = other RNA
tgctgtagctcttgttcccaag

SEQ ID NO: 18231 - RNA, 22 nt, synthetic construct
  misc_feature 1..22: note = HBV-targeting guide sequence portion
  source 1..22: mol_type = other RNA
tgcttagattgaatacatgcat

SEQ ID NO: 18232 - RNA, 22 nt, synthetic construct
  misc_feature 1..22: note = HBV-targeting guide sequence portion
  source 1..22: mol_type = other RNA
tgcttgatcttctaaattagta

SEQ ID NO: 18233 - RNA, 22 nt, synthetic construct
  misc_feature 1..22: note = HBV-targeting guide sequence portion
  source 1..22: mol_type = other RNA
tgcttgcctgagtgcagtatgg

SEQ ID NO: 18234 - RNA, 22 nt, synthetic construct
  misc_feature 1..22: note = HBV-targeting guide sequence portion
  source 1..22: mol_type = other RNA
tgctttaatgcccttgtatgca

SEQ ID NO: 18235 - RNA, 22 nt, synthetic construct
  misc_feature 1..22: note = HBV-targeting guide sequence portion
  source 1..22: mol_type = other RNA
tggaaaacaccctcttttccta

SEQ ID NO: 18236 - RNA, 22 nt, synthetic construct
  misc_feature 1..22: note = HBV-targeting guide sequence portion
  source 1..22: mol_type = other RNA
tggaaactgcacctgtattccc

SEQ ID NO: 18237 - RNA, 22 nt, synthetic construct
  misc_feature 1..22: note = HBV-targeting guide sequence portion
  source 1..22: mol_type = other RNA
tggaaagattctgccccatgct

SEQ ID NO: 18238 - RNA, 22 nt, synthetic construct
  misc_feature 1..22: note = HBV-targeting guide sequence portion
  source 1..22: mol_type = other RNA
tggaaagtgtgtcaacgaattg

SEQ ID NO: 18239 - RNA, 22 nt, synthetic construct
  misc_feature 1..22: note = HBV-targeting guide sequence portion
  source 1..22: mol_type = other RNA
tggaacctttccggctcctctg

SEQ ID NO: 18240 - RNA, 22 nt, synthetic construct
  misc_feature 1..22: note = HBV-targeting guide sequence portion
  source 1..22: mol_type = other RNA
tggaagagaaacggtcctagag

SEQ ID NO: 18241 - RNA, 22 nt, synthetic construct
  misc_feature 1..22: note = HBV-targeting guide sequence portion
  source 1..22: mol_type = other RNA
tggaaggcgggtgttttatata

SEQ ID NO: 18242 - RNA, 22 nt, synthetic construct
  misc_feature 1..22: note = HBV-targeting guide sequence portion
  source 1..22: mol_type = other RNA
tggaagtaatgattaactagat

SEQ ID NO: 18243 - RNA, 22 nt, synthetic construct
  misc_feature 1..22: note = HBV-targeting guide sequence portion
  source 1..22: mol_type = other RNA
tggaattagaggacagacggga

SEQ ID NO: 18244 - RNA, 22 nt, synthetic construct
  misc_feature 1..22: note = HBV-targeting guide sequence portion
  source 1..22: mol_type = other RNA
tggacattgacccatataaaga

SEQ ID NO: 18245 - RNA, 22 nt, synthetic construct
  misc_feature 1..22: note = HBV-targeting guide sequence portion
  source 1..22: mol_type = other RNA
tggacccagccttcagagcaaa

SEQ ID NO: 18246 - RNA, 22 nt, synthetic construct
  misc_feature 1..22: note = HBV-targeting guide sequence portion
  source 1..22: mol_type = other RNA
tggactatcaaggtatgtttcc

SEQ ID NO: 18247 - RNA, 22 nt, synthetic construct
  misc_feature 1..22: note = HBV-targeting guide sequence portion
  source 1..22: mol_type = other RNA
tggactcataaggtgggaaatt

SEQ ID NO: 18248 - RNA, 22 nt, synthetic construct
  misc_feature 1..22: note = HBV-targeting guide sequence portion
  source 1..22: mol_type = other RNA
tggactctctgcaatgtcaacg

SEQ ID NO: 18249 - RNA, 22 nt, synthetic construct
  misc_feature 1..22: note = HBV-targeting guide sequence portion
  source 1..22: mol_type = other RNA
tggacttctctcaattttctag

SEQ ID NO: 18250 - RNA, 22 nt, synthetic construct
  misc_feature 1..22: note = HBV-targeting guide sequence portion
  source 1..22: mol_type = other RNA
tggagaacatcacatcaggatt

SEQ ID NO: 18251 - RNA, 22 nt, synthetic construct
  misc_feature 1..22: note = HBV-targeting guide sequence portion
  source 1..22: mol_type = other RNA
tggagacagcggggtaggctgc

SEQ ID NO: 18252 - RNA, 22 nt, synthetic construct
  misc_feature 1..22: note = HBV-targeting guide sequence portion
  source 1..22: mol_type = other RNA
tggagaccaccgtgaacgccca

SEQ ID NO: 18253 - RNA, 22 nt, synthetic construct
  misc_feature 1..22: note = HBV-targeting guide sequence portion
  source 1..22: mol_type = other RNA
tggagcaaacattctcgggact

SEQ ID NO: 18254 - RNA, 22 nt, synthetic construct
  misc_feature 1..22: note = HBV-targeting guide sequence portion
  source 1..22: mol_type = other RNA
tggagcattcgggctagggttc

SEQ ID NO: 18255 - RNA, 22 nt, synthetic construct
  misc_feature 1..22: note = HBV-targeting guide sequence portion
  source 1..22: mol_type = other RNA
tggagccaccagcagggagata

SEQ ID NO: 18256 - RNA, 22 nt, synthetic construct
  misc_feature 1..22: note = HBV-targeting guide sequence portion
  source 1..22: mol_type = other RNA
tggagccctcaggctcagggca

SEQ ID NO: 18257 - RNA, 22 nt, synthetic construct
  misc_feature 1..22: note = HBV-targeting guide sequence portion
  source 1..22: mol_type = other RNA
tggagctactgtggagttactc

SEQ ID NO: 18258 - RNA, 22 nt, synthetic construct
  misc_feature 1..22: note = HBV-targeting guide sequence portion
  source 1..22: mol_type = other RNA
tggaggacaggaggttggtgag

SEQ ID NO: 18259 - RNA, 22 nt, synthetic construct
  misc_feature 1..22: note = HBV-targeting guide sequence portion
  source 1..22: mol_type = other RNA
tggaggagtgcgaatccacact

SEQ ID NO: 18260 - RNA, 22 nt, synthetic construct
  misc_feature 1..22: note = HBV-targeting guide sequence portion
  source 1..22: mol_type = other RNA
tggaggcttgaacagtaggaca

SEQ ID NO: 18261 - RNA, 22 nt, synthetic construct
  misc_feature 1..22: note = HBV-targeting guide sequence portion
  source 1..22: mol_type = other RNA
tggaggttggggactgcgaatt

SEQ ID NO: 18262 - RNA, 22 nt, synthetic construct
  misc_feature 1..22: note = HBV-targeting guide sequence portion
  source 1..22: mol_type = other RNA
tggagtctcctgagcattgttc

SEQ ID NO: 18263 - RNA, 22 nt, synthetic construct
  misc_feature 1..22: note = HBV-targeting guide sequence portion
  source 1..22: mol_type = other RNA
tggagtgtggattcgcactcct

SEQ ID NO: 18264 - RNA, 22 nt, synthetic construct
  misc_feature 1..22: note = HBV-targeting guide sequence portion
  source 1..22: mol_type = other RNA
tggagttactctcgtttttgcc

SEQ ID NO: 18265 - RNA, 22 nt, synthetic construct
  misc_feature 1..22: note = HBV-targeting guide sequence portion
  source 1..22: mol_type = other RNA
tggagtttgctctgaaggctgg

SEQ ID NO: 18266 - RNA, 22 nt, synthetic construct
  misc_feature 1..22: note = HBV-targeting guide sequence portion
  source 1..22: mol_type = other RNA
tggataagggtattaaacctta

SEQ ID NO: 18267 - RNA, 22 nt, synthetic construct
  misc_feature 1..22: note = HBV-targeting guide sequence portion
  source 1..22: mol_type = other RNA
tggataataaggtttaataccc

SEQ ID NO: 18268 - RNA, 22 nt, synthetic construct
  misc_feature 1..22: note = HBV-targeting guide sequence portion
  source 1..22: mol_type = other RNA
tggatcctgcgcgggacgtcct

SEQ ID NO: 18269 - RNA, 22 nt, synthetic construct
  misc_feature 1..22: note = HBV-targeting guide sequence portion
  source 1..22: mol_type = other RNA
tggatcggcagaggagccggaa

SEQ ID NO: 18270 - RNA, 22 nt, synthetic construct
  misc_feature 1..22: note = HBV-targeting guide sequence portion
  source 1..22: mol_type = other RNA
tggatgatgtggtattgggggc

SEQ ID NO: 18271 - RNA, 22 nt, synthetic construct
  misc_feature 1..22: note = HBV-targeting guide sequence portion
  source 1..22: mol_type = other RNA
tggatgtgtctgcggcgtttta

SEQ ID NO: 18272 - RNA, 22 nt, synthetic construct
  misc_feature 1..22: note = HBV-targeting guide sequence portion
  source 1..22: mol_type = other RNA
tggattcgcactcctccagctt

SEQ ID NO: 18273 - RNA, 22 nt, synthetic construct
  misc_feature 1..22: note = HBV-targeting guide sequence portion
  source 1..22: mol_type = other RNA
tggattgttggagtttgctctg

SEQ ID NO: 18274 - RNA, 22 nt, synthetic construct
  misc_feature 1..22: note = HBV-targeting guide sequence portion
  source 1..22: mol_type = other RNA
tggcaacggggtaaaggttcag

SEQ ID NO: 18275 - RNA, 22 nt, synthetic construct
  misc_feature 1..22: note = HBV-targeting guide sequence portion
  source 1..22: mol_type = other RNA
tggcaaggtttgcattatgccc

SEQ ID NO: 18276 - RNA, 22 nt, synthetic construct
  misc_feature 1..22: note = HBV-targeting guide sequence portion
  source 1..22: mol_type = other RNA
tggcaatgatccccaacaatca

SEQ ID NO: 18277 - RNA, 22 nt, synthetic construct
  misc_feature 1..22: note = HBV-targeting guide sequence portion
  source 1..22: mol_type = other RNA
tggcacagacctggccgttgcc

SEQ ID NO: 18278 - RNA, 22 nt, synthetic construct
  misc_feature 1..22: note = HBV-targeting guide sequence portion
  source 1..22: mol_type = other RNA
tggcactagtaaactgagccaa

SEQ ID NO: 18279 - RNA, 22 nt, synthetic construct
  misc_feature 1..22: note = HBV-targeting guide sequence portion
  source 1..22: mol_type = other RNA
tggcagcacagcctagcagcca

SEQ ID NO: 18280 - RNA, 22 nt, synthetic construct
  misc_feature 1..22: note = HBV-targeting guide sequence portion
  source 1..22: mol_type = other RNA
tggccaaaattcgcagtcccca

SEQ ID NO: 18281 - RNA, 22 nt, synthetic construct
  misc_feature 1..22: note = HBV-targeting guide sequence portion
  source 1..22: mol_type = other RNA
tggccaagacacacggtagttc

SEQ ID NO: 18282 - RNA, 22 nt, synthetic construct
  misc_feature 1..22: note = HBV-targeting guide sequence portion
  source 1..22: mol_type = other RNA
tggccagacgccaacaaggtag

SEQ ID NO: 18283 - RNA, 22 nt, synthetic construct
  misc_feature 1..22: note = HBV-targeting guide sequence portion
  source 1..22: mol_type = other RNA
tggccagggatccttgttggga

SEQ ID NO: 18284 - RNA, 22 nt, synthetic construct
  misc_feature 1..22: note = HBV-targeting guide sequence portion
  source 1..22: mol_type = other RNA
tggcccccaataccacatcatc

SEQ ID NO: 18285 - RNA, 22 nt, synthetic construct
  misc_feature 1..22: note = HBV-targeting guide sequence portion
  source 1..22: mol_type = other RNA
tggccgttgcctggcaacgggg

SEQ ID NO: 18286 - RNA, 22 nt, synthetic construct
  misc_feature 1..22: note = HBV-targeting guide sequence portion
  source 1..22: mol_type = other RNA
tggcctatgaccaagccccaac

SEQ ID NO: 18287 - RNA, 22 nt, synthetic construct
  misc_feature 1..22: note = HBV-targeting guide sequence portion
  source 1..22: mol_type = other RNA
tggcctgaggatgagtgtttct

SEQ ID NO: 18288 - RNA, 22 nt, synthetic construct
  misc_feature 1..22: note = HBV-targeting guide sequence portion
  source 1..22: mol_type = other RNA
tggcgaaaaagtgaaagcctgc

SEQ ID NO: 18289 - RNA, 22 nt, synthetic construct
  misc_feature 1..22: note = HBV-targeting guide sequence portion
  source 1..22: mol_type = other RNA
tggcgattggtagaggcaggag

SEQ ID NO: 18290 - RNA, 22 nt, synthetic construct
  misc_feature 1..22: note = HBV-targeting guide sequence portion
  source 1..22: mol_type = other RNA
tggcgtctggccagggatcctt

SEQ ID NO: 18291 - RNA, 22 nt, synthetic construct
  misc_feature 1..22: note = HBV-targeting guide sequence portion
  source 1..22: mol_type = other RNA
tggctcagtttactagtgccat

SEQ ID NO: 18292 - RNA, 22 nt, synthetic construct
  misc_feature 1..22: note = HBV-targeting guide sequence portion
  source 1..22: mol_type = other RNA
tggctccagttcaggaacagta

SEQ ID NO: 18293 - RNA, 22 nt, synthetic construct
  misc_feature 1..22: note = HBV-targeting guide sequence portion
  source 1..22: mol_type = other RNA
tggctgctaggctgtgctgcca

SEQ ID NO: 18294 - RNA, 22 nt, synthetic construct
  misc_feature 1..22: note = HBV-targeting guide sequence portion
  source 1..22: mol_type = other RNA
tggctttagggcatggacattg

SEQ ID NO: 18295 - RNA, 22 nt, synthetic construct
  misc_feature 1..22: note = HBV-targeting guide sequence portion
  source 1..22: mol_type = other RNA
tggctttcagttatatggatga

SEQ ID NO: 18296 - RNA, 22 nt, synthetic construct
  misc_feature 1..22: note = HBV-targeting guide sequence portion
  source 1..22: mol_type = other RNA
tgggaaattttacggggcttta

SEQ ID NO: 18297 - RNA, 22 nt, synthetic construct
  misc_feature 1..22: note = HBV-targeting guide sequence portion
  source 1..22: mol_type = other RNA
tgggaacaagagctacagcatg

SEQ ID NO: 18298 - RNA, 22 nt, synthetic construct
  misc_feature 1..22: note = HBV-targeting guide sequence portion
  source 1..22: mol_type = other RNA
tgggaacgatgtatatttgcgg

SEQ ID NO: 18299 - RNA, 22 nt, synthetic construct
  misc_feature 1..22: note = HBV-targeting guide sequence portion
  source 1..22: mol_type = other RNA
tgggaatacaggtgcagtttcc

SEQ ID NO: 18300 - RNA, 22 nt, synthetic construct
  misc_feature 1..22: note = HBV-targeting guide sequence portion
  source 1..22: mol_type = other RNA
tgggacttcaatcccaacaagg

SEQ ID NO: 18301 - RNA, 22 nt, synthetic construct
  misc_feature 1..22: note = HBV-targeting guide sequence portion
  source 1..22: mol_type = other RNA
tgggaggagttgggggaggaga

SEQ ID NO: 18302 - RNA, 22 nt, synthetic construct
  misc_feature 1..22: note = HBV-targeting guide sequence portion
  source 1..22: mol_type = other RNA
tgggagtgggcctcagcccgtt

SEQ ID NO: 18303 - RNA, 22 nt, synthetic construct
  misc_feature 1..22: note = HBV-targeting guide sequence portion
  source 1..22: mol_type = other RNA
tgggatcttgcagagtttggtg

SEQ ID NO: 18304 - RNA, 22 nt, synthetic construct
  misc_feature 1..22: note = HBV-targeting guide sequence portion
  source 1..22: mol_type = other RNA
tgggatgggaatacaggtgcag

SEQ ID NO: 18305 - RNA, 22 nt, synthetic construct
  misc_feature 1..22: note = HBV-targeting guide sequence portion
  source 1..22: mol_type = other RNA
tgggattctttcccgaccacca

SEQ ID NO: 18306 - RNA, 22 nt, synthetic construct
  misc_feature 1..22: note = HBV-targeting guide sequence portion
  source 1..22: mol_type = other RNA
tgggattgaagtcccaatctgg

SEQ ID NO: 18307 - RNA, 22 nt, synthetic construct
  misc_feature 1..22: note = HBV-targeting guide sequence portion
  source 1..22: mol_type = other RNA
tgggcaagaattggtgggcgtt

SEQ ID NO: 18308 - RNA, 22 nt, synthetic construct
  misc_feature 1..22: note = HBV-targeting guide sequence portion
  source 1..22: mol_type = other RNA
tgggcctaaagttcagacaact

SEQ ID NO: 18309 - RNA, 22 nt, synthetic construct
  misc_feature 1..22: note = HBV-targeting guide sequence portion
  source 1..22: mol_type = other RNA
tgggcctcagcccgtttctctt

SEQ ID NO: 18310 - RNA, 22 nt, synthetic construct
  misc_feature 1..22: note = HBV-targeting guide sequence portion
  source 1..22: mol_type = other RNA
tgggcgttcacggtggtctcca

SEQ ID NO: 18311 - RNA, 22 nt, synthetic construct
  misc_feature 1..22: note = HBV-targeting guide sequence portion
  source 1..22: mol_type = other RNA
tgggctatgtcattgattgttg

SEQ ID NO: 18312 - RNA, 22 nt, synthetic construct
  misc_feature 1..22: note = HBV-targeting guide sequence portion
  source 1..22: mol_type = other RNA
tgggctttcggaaaattcctat

SEQ ID NO: 18313 - RNA, 22 nt, synthetic construct
  misc_feature 1..22: note = HBV-targeting guide sequence portion
  source 1..22: mol_type = other RNA
tggggaccctgcgctgaacatg

SEQ ID NO: 18314 - RNA, 22 nt, synthetic construct
  misc_feature 1..22: note = HBV-targeting guide sequence portion
  source 1..22: mol_type = other RNA
tggggactgcgaattttggcca

SEQ ID NO: 18315 - RNA, 22 nt, synthetic construct
  misc_feature 1..22: note = HBV-targeting guide sequence portion
  source 1..22: mol_type = other RNA
tggggagaactaatgactctag

SEQ ID NO: 18316 - RNA, 22 nt, synthetic construct
  misc_feature 1..22: note = HBV-targeting guide sequence portion
  source 1..22: mol_type = other RNA
tggggatcattgccacaaaatc

SEQ ID NO: 18317 - RNA, 22 nt, synthetic construct
  misc_feature 1..22: note = HBV-targeting guide sequence portion
  source 1..22: mol_type = other RNA
tggggcagaatctttccaccag

SEQ ID NO: 18318 - RNA, 22 nt, synthetic construct
  misc_feature 1..22: note = HBV-targeting guide sequence portion
  source 1..22: mol_type = other RNA
tggggccctgtcgtcctcttct

SEQ ID NO: 18319 - RNA, 22 nt, synthetic construct
  misc_feature 1..22: note = HBV-targeting guide sequence portion
  source 1..22: mol_type = other RNA
tggggcttggtcataggccatc

SEQ ID NO: 18320 - RNA, 22 nt, synthetic construct
  misc_feature 1..22: note = HBV-targeting guide sequence portion
  source 1..22: mol_type = other RNA
tgggggaaagccctacgaacca

SEQ ID NO: 18321 - RNA, 22 nt, synthetic construct
  misc_feature 1..22: note = HBV-targeting guide sequence portion
  source 1..22: mol_type = other RNA
tgggggaggagattagattaat

SEQ ID NO: 18322 - RNA, 22 nt, synthetic construct
  misc_feature 1..22: note = HBV-targeting guide sequence portion
  source 1..22: mol_type = other RNA
tgggggccaagtctgtacagca

SEQ ID NO: 18323 - RNA, 22 nt, synthetic construct
  misc_feature 1..22: note = HBV-targeting guide sequence portion
  source 1..22: mol_type = other RNA
tgggggttgcatcagcaaacac

SEQ ID NO: 18324 - RNA, 22 nt, synthetic construct
  misc_feature 1..22: note = HBV-targeting guide sequence portion
  source 1..22: mol_type = other RNA
tggggtgaaccctagcccgaat

SEQ ID NO: 18325 - RNA, 22 nt, synthetic construct
  misc_feature 1..22: note = HBV-targeting guide sequence portion
  source 1..22: mol_type = other RNA
tggggtggagccctcaggctca

SEQ ID NO: 18326 - RNA, 22 nt, synthetic construct
  misc_feature 1..22: note = HBV-targeting guide sequence portion
  source 1..22: mol_type = other RNA
tggggttattctcttaatttca

SEQ ID NO: 18327 - RNA, 22 nt, synthetic construct
  misc_feature 1..22: note = HBV-targeting guide sequence portion
  source 1..22: mol_type = other RNA
tgggtactaatttagaagatca

SEQ ID NO: 18328 - RNA, 22 nt, synthetic construct
  misc_feature 1..22: note = HBV-targeting guide sequence portion
  source 1..22: mol_type = other RNA
tgggtcaatgtccatgccctaa

SEQ ID NO: 18329 - RNA, 22 nt, synthetic construct
  misc_feature 1..22: note = HBV-targeting guide sequence portion
  source 1..22: mol_type = other RNA
tgggtcaccatattcttgggaa

SEQ ID NO: 18330 - RNA, 22 nt, synthetic construct
  misc_feature 1..22: note = HBV-targeting guide sequence portion
  source 1..22: mol_type = other RNA
tgggtccaactggtggtcggga

SEQ ID NO: 18331 - RNA, 22 nt, synthetic construct
  misc_feature 1..22: note = HBV-targeting guide sequence portion
  source 1..22: mol_type = other RNA
tgggtcgtccgcgggattcagc

SEQ ID NO: 18332 - RNA, 22 nt, synthetic construct
  misc_feature 1..22: note = HBV-targeting guide sequence portion
  source 1..22: mol_type = other RNA
tgggtcttctgggttttgctgc

SEQ ID NO: 18333 - RNA, 22 nt, synthetic construct
  misc_feature 1..22: note = HBV-targeting guide sequence portion
  source 1..22: mol_type = other RNA
tgggtggctttagggcatggac

SEQ ID NO: 18334 - RNA, 22 nt, synthetic construct
  misc_feature 1..22: note = HBV-targeting guide sequence portion
  source 1..22: mol_type = other RNA
tgggtgggtactaatttagaag

SEQ ID NO: 18335 - RNA, 22 nt, synthetic construct
  misc_feature 1..22: note = HBV-targeting guide sequence portion
  source 1..22: mol_type = other RNA
tgggtgtacatttaaaccctaa

SEQ ID NO: 18336 - RNA, 22 nt, synthetic construct
  misc_feature 1..22: note = HBV-targeting guide sequence portion
  source 1..22: mol_type = other RNA
tgggttttgctgccccttttac

SEQ ID NO: 18337 - RNA, 22 nt, synthetic construct
  misc_feature 1..22: note = HBV-targeting guide sequence portion
  source 1..22: mol_type = other RNA
tggtaacagcggtataaaggga

SEQ ID NO: 18338 - RNA, 22 nt, synthetic construct
  misc_feature 1..22: note = HBV-targeting guide sequence portion
  source 1..22: mol_type = other RNA
tggtagaggcaggaggcggatt

SEQ ID NO: 18339 - RNA, 22 nt, synthetic construct
  misc_feature 1..22: note = HBV-targeting guide sequence portion
  source 1..22: mol_type = other RNA
tggtattgggggccaagtctgt

SEQ ID NO: 18340 - RNA, 22 nt, synthetic construct
  misc_feature 1..22: note = HBV-targeting guide sequence portion
  source 1..22: mol_type = other RNA
tggtcataggccatcagcgcat

SEQ ID NO: 18341 - RNA, 22 nt, synthetic construct
  misc_feature 1..22: note = HBV-targeting guide sequence portion
  source 1..22: mol_type = other RNA
tggtcgggaaagaatcccagag

SEQ ID NO: 18342 - RNA, 22 nt, synthetic construct
  misc_feature 1..22: note = HBV-targeting guide sequence portion
  source 1..22: mol_type = other RNA
tggtcggtcggaacggcaggca

SEQ ID NO: 18343 - RNA, 22 nt, synthetic construct
  misc_feature 1..22: note = HBV-targeting guide sequence portion
  source 1..22: mol_type = other RNA
tggtctataagctggaggagtg

SEQ ID NO: 18344 - RNA, 22 nt, synthetic construct
  misc_feature 1..22: note = HBV-targeting guide sequence portion
  source 1..22: mol_type = other RNA
tggtctccatgcgacgtgcaga

SEQ ID NO: 18345 - RNA, 22 nt, synthetic construct
  misc_feature 1..22: note = HBV-targeting guide sequence portion
  source 1..22: mol_type = other RNA
tggtctgcgcaccagcaccatg

SEQ ID NO: 18346 - RNA, 22 nt, synthetic construct
  misc_feature 1..22: note = HBV-targeting guide sequence portion
  source 1..22: mol_type = other RNA
tggtgaatttaggataaaacct

SEQ ID NO: 18347 - RNA, 22 nt, synthetic construct
  misc_feature 1..22: note = HBV-targeting guide sequence portion
  source 1..22: mol_type = other RNA
tggtgacccacagaatgaggcg

SEQ ID NO: 18348 - RNA, 22 nt, synthetic construct
  misc_feature 1..22: note = HBV-targeting guide sequence portion
  source 1..22: mol_type = other RNA
tggtgaggtgaacaatgctcag

SEQ ID NO: 18349 - RNA, 22 nt, synthetic construct
  misc_feature 1..22: note = HBV-targeting guide sequence portion
  source 1..22: mol_type = other RNA
tggtgagtgattggaggttggg

SEQ ID NO: 18350 - RNA, 22 nt, synthetic construct
  misc_feature 1..22: note = HBV-targeting guide sequence portion
  source 1..22: mol_type = other RNA
tggtgcgcagaccaatttatgc

SEQ ID NO: 18351 - RNA, 22 nt, synthetic construct
  misc_feature 1..22: note = HBV-targeting guide sequence portion
  source 1..22: mol_type = other RNA
tggtgctggtgcgcagaccaat

SEQ ID NO: 18352 - RNA, 22 nt, synthetic construct
  misc_feature 1..22: note = HBV-targeting guide sequence portion
  source 1..22: mol_type = other RNA
tggtggaaagattctgccccat

SEQ ID NO: 18353 - RNA, 22 nt, synthetic construct
  misc_feature 1..22: note = HBV-targeting guide sequence portion
  source 1..22: mol_type = other RNA
tggtggacttctctcaattttc

SEQ ID NO: 18354 - RNA, 22 nt, synthetic construct
  misc_feature 1..22: note = HBV-targeting guide sequence portion
  source 1..22: mol_type = other RNA
tggtggctccagttcaggaaca

SEQ ID NO: 18355 - RNA, 22 nt, synthetic construct
  misc_feature 1..22: note = HBV-targeting guide sequence portion
  source 1..22: mol_type = other RNA
tggtgggcgttcacggtggtct

SEQ ID NO: 18356 - RNA, 22 nt, synthetic construct
  misc_feature 1..22: note = HBV-targeting guide sequence portion
  source 1..22: mol_type = other RNA
tggtggtcgggaaagaatccca

SEQ ID NO: 18357 - RNA, 22 nt, synthetic construct
  misc_feature 1..22: note = HBV-targeting guide sequence portion
  source 1..22: mol_type = other RNA
tggtggtctataagctggagga

SEQ ID NO: 18358 - RNA, 22 nt, synthetic construct
  misc_feature 1..22: note = HBV-targeting guide sequence portion
  source 1..22: mol_type = other RNA
tggtggttgatgatcctggaat

SEQ ID NO: 18359 - RNA, 22 nt, synthetic construct
  misc_feature 1..22: note = HBV-targeting guide sequence portion
  source 1..22: mol_type = other RNA
tggtgtagatgtatattaggaa

SEQ ID NO: 18360 - RNA, 22 nt, synthetic construct
  misc_feature 1..22: note = HBV-targeting guide sequence portion
  source 1..22: mol_type = other RNA
tggtgtcttttggagtgtggat

SEQ ID NO: 18361 - RNA, 22 nt, synthetic construct
  misc_feature 1..22: note = HBV-targeting guide sequence portion
  source 1..22: mol_type = other RNA
tggttatcctgctttaatgccc

SEQ ID NO: 18362 - RNA, 22 nt, synthetic construct
  misc_feature 1..22: note = HBV-targeting guide sequence portion
  source 1..22: mol_type = other RNA
tggttatcgctggatgtgtctg

SEQ ID NO: 18363 - RNA, 22 nt, synthetic construct
  misc_feature 1..22: note = HBV-targeting guide sequence portion
  source 1..22: mol_type = other RNA
tggttcgtagggctttccccca

SEQ ID NO: 18364 - RNA, 22 nt, synthetic construct
  misc_feature 1..22: note = HBV-targeting guide sequence portion
  source 1..22: mol_type = other RNA
tggttcttctggactatcaagg

SEQ ID NO: 18365 - RNA, 22 nt, synthetic construct
  misc_feature 1..22: note = HBV-targeting guide sequence portion
  source 1..22: mol_type = other RNA
tggttgatgatcctggaattag

SEQ ID NO: 18366 - RNA, 22 nt, synthetic construct
  misc_feature 1..22: note = HBV-targeting guide sequence portion
  source 1..22: mol_type = other RNA
tggttggggcttggtcataggc

SEQ ID NO: 18367 - RNA, 22 nt, synthetic construct
  misc_feature 1..22: note = HBV-targeting guide sequence portion
  source 1..22: mol_type = other RNA
tggtttcacatttcttgtctta

SEQ ID NO: 18368 - RNA, 22 nt, synthetic construct
  misc_feature 1..22: note = HBV-targeting guide sequence portion
  source 1..22: mol_type = other RNA
tgtaaaaggggcagcaaaaccc

SEQ ID NO: 18369 - RNA, 22 nt, synthetic construct
  misc_feature 1..22: note = HBV-targeting guide sequence portion
  source 1..22: mol_type = other RNA
tgtaaacaatacctgaaccttt

SEQ ID NO: 18370 - RNA, 22 nt, synthetic construct
  misc_feature 1..22: note = HBV-targeting guide sequence portion
  source 1..22: mol_type = other RNA
tgtaaatagtgtctagtttgga

SEQ ID NO: 18371 - RNA, 22 nt, synthetic construct
  misc_feature 1..22: note = HBV-targeting guide sequence portion
  source 1..22: mol_type = other RNA
tgtaacacgagcaggggtccta

SEQ ID NO: 18372 - RNA, 22 nt, synthetic construct
  misc_feature 1..22: note = HBV-targeting guide sequence portion
  source 1..22: mol_type = other RNA
tgtaagaccttgggcaagaatt

SEQ ID NO: 18373 - RNA, 22 nt, synthetic construct
  misc_feature 1..22: note = HBV-targeting guide sequence portion
  source 1..22: mol_type = other RNA
tgtaagcgggcctacaaactgt

SEQ ID NO: 18374 - RNA, 22 nt, synthetic construct
  misc_feature 1..22: note = HBV-targeting guide sequence portion
  source 1..22: mol_type = other RNA
tgtaagttggcgaaaaagtgaa

SEQ ID NO: 18375 - RNA, 22 nt, synthetic construct
  misc_feature 1..22: note = HBV-targeting guide sequence portion
  source 1..22: mol_type = other RNA
tgtacaaaaccttcggatggaa

SEQ ID NO: 18376 - RNA, 22 nt, synthetic construct
  misc_feature 1..22: note = HBV-targeting guide sequence portion
  source 1..22: mol_type = other RNA
tgtacacccaaagacaaaagaa

SEQ ID NO: 18377 - RNA, 22 nt, synthetic construct
  misc_feature 1..22: note = HBV-targeting guide sequence portion
  source 1..22: mol_type = other RNA
tgtacagacttggcccccaata

SEQ ID NO: 18378 - RNA, 22 nt, synthetic construct
  misc_feature 1..22: note = HBV-targeting guide sequence portion
  source 1..22: mol_type = other RNA
tgtacagcaacaggagggatac

SEQ ID NO: 18379 - RNA, 22 nt, synthetic construct
  misc_feature 1..22: note = HBV-targeting guide sequence portion
  source 1..22: mol_type = other RNA
tgtacagcatcttgagtccctt

SEQ ID NO: 18380 - RNA, 22 nt, synthetic construct
  misc_feature 1..22: note = HBV-targeting guide sequence portion
  source 1..22: mol_type = other RNA
tgtacatttaaaccctaacaaa

SEQ ID NO: 18381 - RNA, 22 nt, synthetic construct
  misc_feature 1..22: note = HBV-targeting guide sequence portion
  source 1..22: mol_type = other RNA
tgtacctgtctttaaccctcat

SEQ ID NO: 18382 - RNA, 22 nt, synthetic construct
  misc_feature 1..22: note = HBV-targeting guide sequence portion
  source 1..22: mol_type = other RNA
tgtactaggaggctgtaggcat

SEQ ID NO: 18383 - RNA, 22 nt, synthetic construct
  misc_feature 1..22: note = HBV-targeting guide sequence portion
  source 1..22: mol_type = other RNA
tgtagatgtatattaggaaaag

SEQ ID NO: 18384 - RNA, 22 nt, synthetic construct
  misc_feature 1..22: note = HBV-targeting guide sequence portion
  source 1..22: mol_type = other RNA
tgtagctcttgttcccaagaat

SEQ ID NO: 18385 - RNA, 22 nt, synthetic construct
  misc_feature 1..22: note = HBV-targeting guide sequence portion
  source 1..22: mol_type = other RNA
tgtaggcataaattggtctgcg

SEQ ID NO: 18386 - RNA, 22 nt, synthetic construct
  misc_feature 1..22: note = HBV-targeting guide sequence portion
  source 1..22: mol_type = other RNA
tgtaggcccgcttacagttaat

SEQ ID NO: 18387 - RNA, 22 nt, synthetic construct
  misc_feature 1..22: note = HBV-targeting guide sequence portion
  source 1..22: mol_type = other RNA
tgtatattaggaaaagagggtg

SEQ ID NO: 18388 - RNA, 22 nt, synthetic construct
  misc_feature 1..22: note = HBV-targeting guide sequence portion
  source 1..22: mol_type = other RNA
tgtatatttgcgggagaggaca

SEQ ID NO: 18389 - RNA, 22 nt, synthetic construct
  misc_feature 1..22: note = HBV-targeting guide sequence portion
  source 1..22: mol_type = other RNA
tgtatccctcctgttgctgtac

SEQ ID NO: 18390 - RNA, 22 nt, synthetic construct
  misc_feature 1..22: note = HBV-targeting guide sequence portion
  source 1..22: mol_type = other RNA
tgtatcgggatgccttggagtc

SEQ ID NO: 18391 - RNA, 22 nt, synthetic construct
  misc_feature 1..22: note = HBV-targeting guide sequence portion
  source 1..22: mol_type = other RNA
tgtatctccctgctggtggctc

SEQ ID NO: 18392 - RNA, 22 nt, synthetic construct
  misc_feature 1..22: note = HBV-targeting guide sequence portion
  source 1..22: mol_type = other RNA
tgtatgatgtgattttgtggca

SEQ ID NO: 18393 - RNA, 22 nt, synthetic construct
  misc_feature 1..22: note = HBV-targeting guide sequence portion
  source 1..22: mol_type = other RNA
tgtatgcatgtattcaatctaa

SEQ ID NO: 18394 - RNA, 22 nt, synthetic construct
  misc_feature 1..22: note = HBV-targeting guide sequence portion
  source 1..22: mol_type = other RNA
tgtattcaatctaagcaggctt

SEQ ID NO: 18395 - RNA, 22 nt, synthetic construct
  misc_feature 1..22: note = HBV-targeting guide sequence portion
  source 1..22: mol_type = other RNA
tgtattcccatcccatcatcct

SEQ ID NO: 18396 - RNA, 22 nt, synthetic construct
  misc_feature 1..22: note = HBV-targeting guide sequence portion
  source 1..22: mol_type = other RNA
tgtcaacaaggaaaaccccgcc

SEQ ID NO: 18397 - RNA, 22 nt, synthetic construct
  misc_feature 1..22: note = HBV-targeting guide sequence portion
  source 1..22: mol_type = other RNA
tgtcaacacatagcgcctcatt

SEQ ID NO: 18398 - RNA, 22 nt, synthetic construct
  misc_feature 1..22: note = HBV-targeting guide sequence portion
  source 1..22: mol_type = other RNA
tgtcaacactcatatgggccta

SEQ ID NO: 18399 - RNA, 22 nt, synthetic construct
  misc_feature 1..22: note = HBV-targeting guide sequence portion
  source 1..22: mol_type = other RNA
tgtcaacgaattgtgggtcttc

SEQ ID NO: 18400 - RNA, 22 nt, synthetic construct
  misc_feature 1..22: note = HBV-targeting guide sequence portion
  source 1..22: mol_type = other RNA
tgtcaacgaccgaccttgaggc

SEQ ID NO: 18401 - RNA, 22 nt, synthetic construct
  misc_feature 1..22: note = HBV-targeting guide sequence portion
  source 1..22: mol_type = other RNA
tgtcagtcccgagaatgtttgc

SEQ ID NO: 18402 - RNA, 22 nt, synthetic construct
  misc_feature 1..22: note = HBV-targeting guide sequence portion
  source 1..22: mol_type = other RNA
tgtcattgattgttggggatca

SEQ ID NO: 18403 - RNA, 22 nt, synthetic construct
  misc_feature 1..22: note = HBV-targeting guide sequence portion
  source 1..22: mol_type = other RNA
tgtccatgccctaaagccaccc

SEQ ID NO: 18404 - RNA, 22 nt, synthetic construct
  misc_feature 1..22: note = HBV-targeting guide sequence portion
  source 1..22: mol_type = other RNA
tgtcctactgttcaagcctcca

SEQ ID NO: 18405 - RNA, 22 nt, synthetic construct
  misc_feature 1..22: note = HBV-targeting guide sequence portion
  source 1..22: mol_type = other RNA
tgtcctccaacttgtcctggtt

SEQ ID NO: 18406 - RNA, 22 nt, synthetic construct
  misc_feature 1..22: note = HBV-targeting guide sequence portion
  source 1..22: mol_type = other RNA
tgtcctctaattccaggatcat

SEQ ID NO: 18407 - RNA, 22 nt, synthetic construct
  misc_feature 1..22: note = HBV-targeting guide sequence portion
  source 1..22: mol_type = other RNA
tgtcctctcccgcaaatataca

SEQ ID NO: 18408 - RNA, 22 nt, synthetic construct
  misc_feature 1..22: note = HBV-targeting guide sequence portion
  source 1..22: mol_type = other RNA
tgtcctggttatcgctggatgt

SEQ ID NO: 18409 - RNA, 22 nt, synthetic construct
  misc_feature 1..22: note = HBV-targeting guide sequence portion
  source 1..22: mol_type = other RNA
tgtcgtcctcttctctgcctgc

SEQ ID NO: 18410 - RNA, 22 nt, synthetic construct
  misc_feature 1..22: note = HBV-targeting guide sequence portion
  source 1..22: mol_type = other RNA
tgtctagtttggaagtaatgat

SEQ ID NO: 18411 - RNA, 22 nt, synthetic construct
  misc_feature 1..22: note = HBV-targeting guide sequence portion
  source 1..22: mol_type = other RNA
tgtctccacctctgagaaacac

SEQ ID NO: 18412 - RNA, 22 nt, synthetic construct
  misc_feature 1..22: note = HBV-targeting guide sequence portion
  source 1..22: mol_type = other RNA
tgtctgaactttaggcccatat

SEQ ID NO: 18413 - RNA, 22 nt, synthetic construct
  misc_feature 1..22: note = HBV-targeting guide sequence portion
  source 1..22: mol_type = other RNA
tgtctgcggcgttttatcatct

SEQ ID NO: 18414 - RNA, 22 nt, synthetic construct
  misc_feature 1..22: note = HBV-targeting guide sequence portion
  source 1..22: mol_type = other RNA
tgtcttacttttggaagagaaa

SEQ ID NO: 18415 - RNA, 22 nt, synthetic construct
  misc_feature 1..22: note = HBV-targeting guide sequence portion
  source 1..22: mol_type = other RNA
tgtcttggccaaaattcgcagt

SEQ ID NO: 18416 - RNA, 22 nt, synthetic construct
  misc_feature 1..22: note = HBV-targeting guide sequence portion
  source 1..22: mol_type = other RNA
tgtctttaaccctcattggaaa

SEQ ID NO: 18417 - RNA, 22 nt, synthetic construct
  misc_feature 1..22: note = HBV-targeting guide sequence portion
  source 1..22: mol_type = other RNA
tgtctttgggtgtacatttaaa

SEQ ID NO: 18418 - RNA, 22 nt, synthetic construct
  misc_feature 1..22: note = HBV-targeting guide sequence portion
  source 1..22: mol_type = other RNA
tgtcttttggagtgtggattcg

SEQ ID NO: 18419 - RNA, 22 nt, synthetic construct
  misc_feature 1..22: note = HBV-targeting guide sequence portion
  source 1..22: mol_type = other RNA
tgtgaaaccacaatagttgtct

SEQ ID NO: 18420 - RNA, 22 nt, synthetic construct
  misc_feature 1..22: note = HBV-targeting guide sequence portion
  source 1..22: mol_type = other RNA
tgtgaacagtttgtaggcccgc

SEQ ID NO: 18421 - RNA, 22 nt, synthetic construct
  misc_feature 1..22: note = HBV-targeting guide sequence portion
  source 1..22: mol_type = other RNA
tgtgagaggcagtagtcggaac

SEQ ID NO: 18422 - RNA, 22 nt, synthetic construct
  misc_feature 1..22: note = HBV-targeting guide sequence portion
  source 1..22: mol_type = other RNA
tgtgaggattcttgtcaacaag

SEQ ID NO: 18423 - RNA, 22 nt, synthetic construct
  misc_feature 1..22: note = HBV-targeting guide sequence portion
  source 1..22: mol_type = other RNA
tgtgatgttctccatgttcagc

SEQ ID NO: 18424 - RNA, 22 nt, synthetic construct
  misc_feature 1..22: note = HBV-targeting guide sequence portion
  source 1..22: mol_type = other RNA
tgtgattttgtggcaatgatcc

SEQ ID NO: 18425 - RNA, 22 nt, synthetic construct
  misc_feature 1..22: note = HBV-targeting guide sequence portion
  source 1..22: mol_type = other RNA
tgtgcacttcgcttcacctctg

SEQ ID NO: 18426 - RNA, 22 nt, synthetic construct
  misc_feature 1..22: note = HBV-targeting guide sequence portion
  source 1..22: mol_type = other RNA
tgtgccaagtgtttgctgatgc

SEQ ID NO: 18427 - RNA, 22 nt, synthetic construct
  misc_feature 1..22: note = HBV-targeting guide sequence portion
  source 1..22: mol_type = other RNA
tgtgccttctcatctgccggac

SEQ ID NO: 18428 - RNA, 22 nt, synthetic construct
  misc_feature 1..22: note = HBV-targeting guide sequence portion
  source 1..22: mol_type = other RNA
tgtgccttgggtggctttaggg

SEQ ID NO: 18429 - RNA, 22 nt, synthetic construct
  misc_feature 1..22: note = HBV-targeting guide sequence portion
  source 1..22: mol_type = other RNA
tgtgctgccaactggatcctgc

SEQ ID NO: 18430 - RNA, 22 nt, synthetic construct
  misc_feature 1..22: note = HBV-targeting guide sequence portion
  source 1..22: mol_type = other RNA
tgtggagttactctcgtttttg

SEQ ID NO: 18431 - RNA, 22 nt, synthetic construct
  misc_feature 1..22: note = HBV-targeting guide sequence portion
  source 1..22: mol_type = other RNA
tgtggattcgcactcctccagc

SEQ ID NO: 18432 - RNA, 22 nt, synthetic construct
  misc_feature 1..22: note = HBV-targeting guide sequence portion
  source 1..22: mol_type = other RNA
tgtggcaatgatccccaacaat

SEQ ID NO: 18433 - RNA, 22 nt, synthetic construct
  misc_feature 1..22: note = HBV-targeting guide sequence portion
  source 1..22: mol_type = other RNA
tgtgggtcaccatattcttggg

SEQ ID NO: 18434 - RNA, 22 nt, synthetic construct
  misc_feature 1..22: note = HBV-targeting guide sequence portion
  source 1..22: mol_type = other RNA
tgtgggtcttctgggttttgct

SEQ ID NO: 18435 - RNA, 22 nt, synthetic construct
  misc_feature 1..22: note = HBV-targeting guide sequence portion
  source 1..22: mol_type = other RNA
tgtggtattgggggccaagtct

SEQ ID NO: 18436 - RNA, 22 nt, synthetic construct
  misc_feature 1..22: note = HBV-targeting guide sequence portion
  source 1..22: mol_type = other RNA
tgtggttatcctgctttaatgc

SEQ ID NO: 18437 - RNA, 22 nt, synthetic construct
  misc_feature 1..22: note = HBV-targeting guide sequence portion
  source 1..22: mol_type = other RNA
tgtggtttcacatttcttgtct

SEQ ID NO: 18438 - RNA, 22 nt, synthetic construct
  misc_feature 1..22: note = HBV-targeting guide sequence portion
  source 1..22: mol_type = other RNA
tgtgtaaaaggggcagcaaaac

SEQ ID NO: 18439 - RNA, 22 nt, synthetic construct
  misc_feature 1..22: note = HBV-targeting guide sequence portion
  source 1..22: mol_type = other RNA
tgtgtaaacaatacctgaacct

SEQ ID NO: 18440 - RNA, 22 nt, synthetic construct
  misc_feature 1..22: note = HBV-targeting guide sequence portion
  source 1..22: mol_type = other RNA
tgtgtaaatagtgtctagtttg

SEQ ID NO: 18441 - RNA, 22 nt, synthetic construct
  misc_feature 1..22: note = HBV-targeting guide sequence portion
  source 1..22: mol_type = other RNA
tgtgtatgatgtgattttgtgg

SEQ ID NO: 18442 - RNA, 22 nt, synthetic construct
  misc_feature 1..22: note = HBV-targeting guide sequence portion
  source 1..22: mol_type = other RNA
tgtgtcaacgaattgtgggtct

SEQ ID NO: 18443 - RNA, 22 nt, synthetic construct
  misc_feature 1..22: note = HBV-targeting guide sequence portion
  source 1..22: mol_type = other RNA
tgtgtctgcggcgttttatcat

SEQ ID NO: 18444 - RNA, 22 nt, synthetic construct
  misc_feature 1..22: note = HBV-targeting guide sequence portion
  source 1..22: mol_type = other RNA
tgtgtcttggccaaaattcgca

SEQ ID NO: 18445 - RNA, 22 nt, synthetic construct
  misc_feature 1..22: note = HBV-targeting guide sequence portion
  source 1..22: mol_type = other RNA
tgtgttgacactctcttatata

SEQ ID NO: 18446 - RNA, 22 nt, synthetic construct
  misc_feature 1..22: note = HBV-targeting guide sequence portion
  source 1..22: mol_type = other RNA
tgtgttgttagacgacgaggca

SEQ ID NO: 18447 - RNA, 22 nt, synthetic construct
  misc_feature 1..22: note = HBV-targeting guide sequence portion
  source 1..22: mol_type = other RNA
tgttaaccgggagttttctgaa

SEQ ID NO: 18448 - RNA, 22 nt, synthetic construct
  misc_feature 1..22: note = HBV-targeting guide sequence portion
  source 1..22: mol_type = other RNA
tgttacaggcggggttttcctt

SEQ ID NO: 18449 - RNA, 22 nt, synthetic construct
  misc_feature 1..22: note = HBV-targeting guide sequence portion
  source 1..22: mol_type = other RNA
tgttaccaattttcttttgtct

SEQ ID NO: 18450 - RNA, 22 nt, synthetic construct
  misc_feature 1..22: note = HBV-targeting guide sequence portion
  source 1..22: mol_type = other RNA
tgttagacgacgaggcaggtcc

SEQ ID NO: 18451 - RNA, 22 nt, synthetic construct
  misc_feature 1..22: note = HBV-targeting guide sequence portion
  source 1..22: mol_type = other RNA
tgttagggtttaaatgtacacc

SEQ ID NO: 18452 - RNA, 22 nt, synthetic construct
  misc_feature 1..22: note = HBV-targeting guide sequence portion
  source 1..22: mol_type = other RNA
tgttagtatcccttggactcat

SEQ ID NO: 18453 - RNA, 22 nt, synthetic construct
  misc_feature 1..22: note = HBV-targeting guide sequence portion
  source 1..22: mol_type = other RNA
tgttcaagcctccaagctgtgc

SEQ ID NO: 18454 - RNA, 22 nt, synthetic construct
  misc_feature 1..22: note = HBV-targeting guide sequence portion
  source 1..22: mol_type = other RNA
tgttcacattttttgataatat

SEQ ID NO: 18455 - RNA, 22 nt, synthetic construct
  misc_feature 1..22: note = HBV-targeting guide sequence portion
  source 1..22: mol_type = other RNA
tgttcacctcaccatactgcac

SEQ ID NO: 18456 - RNA, 22 nt, synthetic construct
  misc_feature 1..22: note = HBV-targeting guide sequence portion
  source 1..22: mol_type = other RNA
tgttcagcgcagggtccccaat

SEQ ID NO: 18457 - RNA, 22 nt, synthetic construct
  misc_feature 1..22: note = HBV-targeting guide sequence portion
  source 1..22: mol_type = other RNA
tgttcagtggttcgtagggctt

SEQ ID NO: 18458 - RNA, 22 nt, synthetic construct
  misc_feature 1..22: note = HBV-targeting guide sequence portion
  source 1..22: mol_type = other RNA
tgttcatgtcctactgttcaag

SEQ ID NO: 18459 - RNA, 22 nt, synthetic construct
  misc_feature 1..22: note = HBV-targeting guide sequence portion
  source 1..22: mol_type = other RNA
tgttcccaagaatatggtgacc

SEQ ID NO: 18460 - RNA, 22 nt, synthetic construct
  misc_feature 1..22: note = HBV-targeting guide sequence portion
  source 1..22: mol_type = other RNA
tgttccgactactgcctctcac

SEQ ID NO: 18461 - RNA, 22 nt, synthetic construct
  misc_feature 1..22: note = HBV-targeting guide sequence portion
  source 1..22: mol_type = other RNA
tgttcctgaactggagccacca

SEQ ID NO: 18462 - RNA, 22 nt, synthetic construct
  misc_feature 1..22: note = HBV-targeting guide sequence portion
  source 1..22: mol_type = other RNA
tgttctccatgttcagcgcagg

SEQ ID NO: 18463 - RNA, 22 nt, synthetic construct
  misc_feature 1..22: note = HBV-targeting guide sequence portion
  source 1..22: mol_type = other RNA
tgttctggataataaggtttaa

SEQ ID NO: 18464 - RNA, 22 nt, synthetic construct
  misc_feature 1..22: note = HBV-targeting guide sequence portion
  source 1..22: mol_type = other RNA
tgttgacaagaatcctcacaat

SEQ ID NO: 18465 - RNA, 22 nt, synthetic construct
  misc_feature 1..22: note = HBV-targeting guide sequence portion
  source 1..22: mol_type = other RNA
tgttgacactctcttatataaa

SEQ ID NO: 18466 - RNA, 22 nt, synthetic construct
  misc_feature 1..22: note = HBV-targeting guide sequence portion
  source 1..22: mol_type = other RNA
tgttgacataactgactactag

SEQ ID NO: 18467 - RNA, 22 nt, synthetic construct
  misc_feature 1..22: note = HBV-targeting guide sequence portion
  source 1..22: mol_type = other RNA
tgttgataggataggggcattt

SEQ ID NO: 18468 - RNA, 22 nt, synthetic construct
  misc_feature 1..22: note = HBV-targeting guide sequence portion
  source 1..22: mol_type = other RNA
tgttgctgtacaaaaccttcgg

SEQ ID NO: 18469 - RNA, 22 nt, synthetic construct
  misc_feature 1..22: note = HBV-targeting guide sequence portion
  source 1..22: mol_type = other RNA
tgttggagtttgctctgaaggc

SEQ ID NO: 18470 - RNA, 22 nt, synthetic construct
  misc_feature 1..22: note = HBV-targeting guide sequence portion
  source 1..22: mol_type = other RNA
tgttggcgtctggccagggatc

SEQ ID NO: 18471 - RNA, 22 nt, synthetic construct
  misc_feature 1..22: note = HBV-targeting guide sequence portion
  source 1..22: mol_type = other RNA
tgttgggattgaagtcccaatc

SEQ ID NO: 18472 - RNA, 22 nt, synthetic construct
  misc_feature 1..22: note = HBV-targeting guide sequence portion
  source 1..22: mol_type = other RNA
tgttggggatcattgccacaaa

SEQ ID NO: 18473 - RNA, 22 nt, synthetic construct
  misc_feature 1..22: note = HBV-targeting guide sequence portion
  source 1..22: mol_type = other RNA
tgttggttcttctggactatca

SEQ ID NO: 18474 - RNA, 22 nt, synthetic construct
  misc_feature 1..22: note = HBV-targeting guide sequence portion
  source 1..22: mol_type = other RNA
tgttgtcctctcccgcaaatat

SEQ ID NO: 18475 - RNA, 22 nt, synthetic construct
  misc_feature 1..22: note = HBV-targeting guide sequence portion
  source 1..22: mol_type = other RNA
tgttgttagacgacgaggcagg

SEQ ID NO: 18476 - RNA, 22 nt, synthetic construct
  misc_feature 1..22: note = HBV-targeting guide sequence portion
  source 1..22: mol_type = other RNA
tgtttaaagactgggaggagtt

SEQ ID NO: 18477 - RNA, 22 nt, synthetic construct
  misc_feature 1..22: note = HBV-targeting guide sequence portion
  source 1..22: mol_type = other RNA
tgtttacacagaaaggccttgt

SEQ ID NO: 18478 - RNA, 22 nt, synthetic construct
  misc_feature 1..22: note = HBV-targeting guide sequence portion
  source 1..22: mol_type = other RNA
tgtttacgtcccgtcggcgctg

SEQ ID NO: 18479 - RNA, 22 nt, synthetic construct
  misc_feature 1..22: note = HBV-targeting guide sequence portion
  source 1..22: mol_type = other RNA
tgtttcagaaaactcccggtta

SEQ ID NO: 18480 - RNA, 22 nt, synthetic construct
  misc_feature 1..22: note = HBV-targeting guide sequence portion
  source 1..22: mol_type = other RNA
tgtttcccgtctgtcctctaat

SEQ ID NO: 18481 - RNA, 22 nt, synthetic construct
  misc_feature 1..22: note = HBV-targeting guide sequence portion
  source 1..22: mol_type = other RNA
tgtttctcagaggtggagacag

SEQ ID NO: 18482 - RNA, 22 nt, synthetic construct
  misc_feature 1..22: note = HBV-targeting guide sequence portion
  source 1..22: mol_type = other RNA
tgtttgctccagaccggctgcg

SEQ ID NO: 18483 - RNA, 22 nt, synthetic construct
  misc_feature 1..22: note = HBV-targeting guide sequence portion
  source 1..22: mol_type = other RNA
tgtttgctgatgcaacccccac

SEQ ID NO: 18484 - RNA, 22 nt, synthetic construct
  misc_feature 1..22: note = HBV-targeting guide sequence portion
  source 1..22: mol_type = other RNA
tgtttggctttcagttatatgg

SEQ ID NO: 18485 - RNA, 22 nt, synthetic construct
  misc_feature 1..22: note = HBV-targeting guide sequence portion
  source 1..22: mol_type = other RNA
tgtttgtttaaagactgggagg

SEQ ID NO: 18486 - RNA, 22 nt, synthetic construct
  misc_feature 1..22: note = HBV-targeting guide sequence portion
  source 1..22: mol_type = other RNA
tgttttatataagagagtgtca

SEQ ID NO: 18487 - RNA, 22 nt, synthetic construct
  misc_feature 1..22: note = HBV-targeting guide sequence portion
  source 1..22: mol_type = other RNA
tgttttccaatgagggttaaag

SEQ ID NO: 18488 - RNA, 22 nt, synthetic construct
  misc_feature 1..22: note = HBV-targeting guide sequence portion
  source 1..22: mol_type = other RNA
tgttttgctcgcagccggtctg

SEQ ID NO: 18489 - RNA, 22 nt, synthetic construct
  misc_feature 1..22: note = HBV-targeting guide sequence portion
  source 1..22: mol_type = other RNA
tgttttgttagggtttaaatgt

SEQ ID NO: 18490 - RNA, 22 nt, synthetic construct
  misc_feature 1..22: note = HBV-targeting guide sequence portion
  source 1..22: mol_type = other RNA
ttaaacaaacagtctttgaagt

SEQ ID NO: 18491 - RNA, 22 nt, synthetic construct
  misc_feature 1..22: note = HBV-targeting guide sequence portion
  source 1..22: mol_type = other RNA
ttaaaccctaacaaaacaaaga

SEQ ID NO: 18492 - RNA, 22 nt, synthetic construct
  misc_feature 1..22: note = HBV-targeting guide sequence portion
  source 1..22: mol_type = other RNA
ttaaaccttattatccagaaca

SEQ ID NO: 18493 - RNA, 22 nt, synthetic construct
  misc_feature 1..22: note = HBV-targeting guide sequence portion
  source 1..22: mol_type = other RNA
ttaaagacaggtacagtagaag

SEQ ID NO: 18494 - RNA, 22 nt, synthetic construct
  misc_feature 1..22: note = HBV-targeting guide sequence portion
  source 1..22: mol_type = other RNA
ttaaagactgggaggagttggg

SEQ ID NO: 18495 - RNA, 22 nt, synthetic construct
  misc_feature 1..22: note = HBV-targeting guide sequence portion
  source 1..22: mol_type = other RNA
ttaaagcaggataaccacattg

SEQ ID NO: 18496 - RNA, 22 nt, synthetic construct
  misc_feature 1..22: note = HBV-targeting guide sequence portion
  source 1..22: mol_type = other RNA
ttaaatgtacacccaaagacaa

SEQ ID NO: 18497 - RNA, 22 nt, synthetic construct
  misc_feature 1..22: note = HBV-targeting guide sequence portion
  source 1..22: mol_type = other RNA
ttaacaggcctattgattggaa

SEQ ID NO: 18498 - RNA, 22 nt, synthetic construct
  misc_feature 1..22: note = HBV-targeting guide sequence portion
  source 1..22: mol_type = other RNA
ttaaccctcattggaaaacacc

SEQ ID NO: 18499 - RNA, 22 nt, synthetic construct
  misc_feature 1..22: note = HBV-targeting guide sequence portion
  source 1..22: mol_type = other RNA
ttaaccgggagttttctgaaac

SEQ ID NO: 18500 - RNA, 22 nt, synthetic construct
  misc_feature 1..22: note = HBV-targeting guide sequence portion
  source 1..22: mol_type = other RNA
ttaactagatgttctggataat

SEQ ID NO: 18501 - RNA, 22 nt, synthetic construct
  misc_feature 1..22: note = HBV-targeting guide sequence portion
  source 1..22: mol_type = other RNA
ttaactgtaagcgggcctacaa

SEQ ID NO: 18502 - RNA, 22 nt, synthetic construct
  misc_feature 1..22: note = HBV-targeting guide sequence portion
  source 1..22: mol_type = other RNA
ttaagagaataaccccatctct

SEQ ID NO: 18503 - RNA, 22 nt, synthetic construct
  misc_feature 1..22: note = HBV-targeting guide sequence portion
  source 1..22: mol_type = other RNA
ttaatacccttatccaagggca

SEQ ID NO: 18504 - RNA, 22 nt, synthetic construct
  misc_feature 1..22: note = HBV-targeting guide sequence portion
  source 1..22: mol_type = other RNA
ttaatcattacttccaaactag

SEQ ID NO: 18505 - RNA, 22 nt, synthetic construct
  misc_feature 1..22: note = HBV-targeting guide sequence portion
  source 1..22: mol_type = other RNA
ttaatctaatctcctcccccaa

SEQ ID NO: 18506 - RNA, 22 nt, synthetic construct
  misc_feature 1..22: note = HBV-targeting guide sequence portion
  source 1..22: mol_type = other RNA
ttaatgagaaaagacggttgaa

SEQ ID NO: 18507 - RNA, 22 nt, synthetic construct
  misc_feature 1..22: note = HBV-targeting guide sequence portion
  source 1..22: mol_type = other RNA
ttaatgatctttgtactaggag

SEQ ID NO: 18508 - RNA, 22 nt, synthetic construct
  misc_feature 1..22: note = HBV-targeting guide sequence portion
  source 1..22: mol_type = other RNA
ttaatgcccttgtatgcatgta

SEQ ID NO: 18509 - RNA, 22 nt, synthetic construct
  misc_feature 1..22: note = HBV-targeting guide sequence portion
  source 1..22: mol_type = other RNA
ttaatttcatgggctatgtcat

SEQ ID NO: 18510 - RNA, 22 nt, synthetic construct
  misc_feature 1..22: note = HBV-targeting guide sequence portion
  source 1..22: mol_type = other RNA
ttacaaggcctttctgtgtaaa

SEQ ID NO: 18511 - RNA, 22 nt, synthetic construct
  misc_feature 1..22: note = HBV-targeting guide sequence portion
  source 1..22: mol_type = other RNA
ttacacaatgtggttatcctgc

SEQ ID NO: 18512 - RNA, 22 nt, synthetic construct
  misc_feature 1..22: note = HBV-targeting guide sequence portion
  source 1..22: mol_type = other RNA
ttacacactctatggaaggcgg

SEQ ID NO: 18513 - RNA, 22 nt, synthetic construct
  misc_feature 1..22: note = HBV-targeting guide sequence portion
  source 1..22: mol_type = other RNA
ttacacagaaaggccttgtaag

SEQ ID NO: 18514 - RNA, 22 nt, synthetic construct
  misc_feature 1..22: note = HBV-targeting guide sequence portion
  source 1..22: mol_type = other RNA
ttacaggcggggttttccttgt

SEQ ID NO: 18515 - RNA, 22 nt, synthetic construct
  misc_feature 1..22: note = HBV-targeting guide sequence portion
  source 1..22: mol_type = other RNA
ttacagttaatgagaaaagacg

SEQ ID NO: 18516 - RNA, 22 nt, synthetic construct
  misc_feature 1..22: note = HBV-targeting guide sequence portion
  source 1..22: mol_type = other RNA
ttacataagaggactcttggac

SEQ ID NO: 18517 - RNA, 22 nt, synthetic construct
  misc_feature 1..22: note = HBV-targeting guide sequence portion
  source 1..22: mol_type = other RNA
ttaccaattttcttttgtcttt

SEQ ID NO: 18518 - RNA, 22 nt, synthetic construct
  misc_feature 1..22: note = HBV-targeting guide sequence portion
  source 1..22: mol_type = other RNA
ttaccccgttgccaggcaacgg

SEQ ID NO: 18519 - RNA, 22 nt, synthetic construct
  misc_feature 1..22: note = HBV-targeting guide sequence portion
  source 1..22: mol_type = other RNA
ttacgcggactccccgtctgtg

SEQ ID NO: 18520 - RNA, 22 nt, synthetic construct
  misc_feature 1..22: note = HBV-targeting guide sequence portion
  source 1..22: mol_type = other RNA
ttacggggctttattcttctac

SEQ ID NO: 18521 - RNA, 22 nt, synthetic construct
  misc_feature 1..22: note = HBV-targeting guide sequence portion
  source 1..22: mol_type = other RNA
ttacgtcccgtcggcgctgaat

SEQ ID NO: 18522 - RNA, 22 nt, synthetic construct
  misc_feature 1..22: note = HBV-targeting guide sequence portion
  source 1..22: mol_type = other RNA
ttactagtgccatttgttcagt

SEQ ID NO: 18523 - RNA, 22 nt, synthetic construct
  misc_feature 1..22: note = HBV-targeting guide sequence portion
  source 1..22: mol_type = other RNA
ttactctcgtttttgccttctg

SEQ ID NO: 18524 - RNA, 22 nt, synthetic construct
  misc_feature 1..22: note = HBV-targeting guide sequence portion
  source 1..22: mol_type = other RNA
ttactgttcctgaactggagcc

SEQ ID NO: 18525 - RNA, 22 nt, synthetic construct
  misc_feature 1..22: note = HBV-targeting guide sequence portion
  source 1..22: mol_type = other RNA
ttacttccaaactagacactat

SEQ ID NO: 18526 - RNA, 22 nt, synthetic construct
  misc_feature 1..22: note = HBV-targeting guide sequence portion
  source 1..22: mol_type = other RNA
ttacttttggaagagaaacggt

SEQ ID NO: 18527 - RNA, 22 nt, synthetic construct
  misc_feature 1..22: note = HBV-targeting guide sequence portion
  source 1..22: mol_type = other RNA
ttagaagatcaagcatctaggg

SEQ ID NO: 18528 - RNA, 22 nt, synthetic construct
  misc_feature 1..22: note = HBV-targeting guide sequence portion
  source 1..22: mol_type = other RNA
ttagacgacgaggcaggtcccc

SEQ ID NO: 18529 - RNA, 22 nt, synthetic construct
  misc_feature 1..22: note = HBV-targeting guide sequence portion
  source 1..22: mol_type = other RNA
ttagaggacagacgggaaacat

SEQ ID NO: 18530 - RNA, 22 nt, synthetic construct
  misc_feature 1..22: note = HBV-targeting guide sequence portion
  source 1..22: mol_type = other RNA
ttagattaatgatctttgtact

SEQ ID NO: 18531 - RNA, 22 nt, synthetic construct
  misc_feature 1..22: note = HBV-targeting guide sequence portion
  source 1..22: mol_type = other RNA
ttagattgaatacatgcataca

SEQ ID NO: 18532 - RNA, 22 nt, synthetic construct
  misc_feature 1..22: note = HBV-targeting guide sequence portion
  source 1..22: mol_type = other RNA
ttaggaaaagagggtgttttcc

SEQ ID NO: 18533 - RNA, 22 nt, synthetic construct
  misc_feature 1..22: note = HBV-targeting guide sequence portion
  source 1..22: mol_type = other RNA
ttaggataaaacctagcaggca

SEQ ID NO: 18534 - RNA, 22 nt, synthetic construct
  misc_feature 1..22: note = HBV-targeting guide sequence portion
  source 1..22: mol_type = other RNA
ttaggcagaggtgaaaaagttg

SEQ ID NO: 18535 - RNA, 22 nt, synthetic construct
  misc_feature 1..22: note = HBV-targeting guide sequence portion
  source 1..22: mol_type = other RNA
ttaggcccatatgagtgttgac

SEQ ID NO: 18536 - RNA, 22 nt, synthetic construct
  misc_feature 1..22: note = HBV-targeting guide sequence portion
  source 1..22: mol_type = other RNA
ttagggcatggacattgaccca

SEQ ID NO: 18537 - RNA, 22 nt, synthetic construct
  misc_feature 1..22: note = HBV-targeting guide sequence portion
  source 1..22: mol_type = other RNA
ttagggtttaaatgtacaccca

SEQ ID NO: 18538 - RNA, 22 nt, synthetic construct
  misc_feature 1..22: note = HBV-targeting guide sequence portion
  source 1..22: mol_type = other RNA
ttagtacccacccaggtagcta

SEQ ID NO: 18539 - RNA, 22 nt, synthetic construct
  misc_feature 1..22: note = HBV-targeting guide sequence portion
  source 1..22: mol_type = other RNA
ttagtatcccttggactcataa

SEQ ID NO: 18540 - RNA, 22 nt, synthetic construct
  misc_feature 1..22: note = HBV-targeting guide sequence portion
  source 1..22: mol_type = other RNA
ttagttctccccagcaaagaat

SEQ ID NO: 18541 - RNA, 22 nt, synthetic construct
  misc_feature 1..22: note = HBV-targeting guide sequence portion
  source 1..22: mol_type = other RNA
ttataccgctgttaccaatttt

SEQ ID NO: 18542 - RNA, 22 nt, synthetic construct
  misc_feature 1..22: note = HBV-targeting guide sequence portion
  source 1..22: mol_type = other RNA
ttatagaccaccaaatgcccct

SEQ ID NO: 18543 - RNA, 22 nt, synthetic construct
  misc_feature 1..22: note = HBV-targeting guide sequence portion
  source 1..22: mol_type = other RNA
ttatataaaacacccgccttcc

SEQ ID NO: 18544 - RNA, 22 nt, synthetic construct
  misc_feature 1..22: note = HBV-targeting guide sequence portion
  source 1..22: mol_type = other RNA
ttatataagagagtgtcaacac

SEQ ID NO: 18545 - RNA, 22 nt, synthetic construct
  misc_feature 1..22: note = HBV-targeting guide sequence portion
  source 1..22: mol_type = other RNA
ttatatggatgatgtggtattg

SEQ ID NO: 18546 - RNA, 22 nt, synthetic construct
  misc_feature 1..22: note = HBV-targeting guide sequence portion
  source 1..22: mol_type = other RNA
ttatatgggtcaatgtccatgc

SEQ ID NO: 18547 - RNA, 22 nt, synthetic construct
  misc_feature 1..22: note = HBV-targeting guide sequence portion
  source 1..22: mol_type = other RNA
ttatcaaaaaatgtgaacagtt

SEQ ID NO: 18548 - RNA, 22 nt, synthetic construct
  misc_feature 1..22: note = HBV-targeting guide sequence portion
  source 1..22: mol_type = other RNA
ttatcatcttcctcttcatcct

SEQ ID NO: 18549 - RNA, 22 nt, synthetic construct
  misc_feature 1..22: note = HBV-targeting guide sequence portion
  source 1..22: mol_type = other RNA
ttatccaagggcaagtatttgg

SEQ ID NO: 18550 - RNA, 22 nt, synthetic construct
  misc_feature 1..22: note = HBV-targeting guide sequence portion
  source 1..22: mol_type = other RNA
ttatccagaacatctagttaat

SEQ ID NO: 18551 - RNA, 22 nt, synthetic construct
  misc_feature 1..22: note = HBV-targeting guide sequence portion
  source 1..22: mol_type = other RNA
ttatcctaaattcaccaaatac

SEQ ID NO: 18552 - RNA, 22 nt, synthetic construct
  misc_feature 1..22: note = HBV-targeting guide sequence portion
  source 1..22: mol_type = other RNA
ttatcctgctttaatgcccttg

SEQ ID NO: 18553 - RNA, 22 nt, synthetic construct
  misc_feature 1..22: note = HBV-targeting guide sequence portion
  source 1..22: mol_type = other RNA
ttatcgctggatgtgtctgcgg

SEQ ID NO: 18554 - RNA, 22 nt, synthetic construct
  misc_feature 1..22: note = HBV-targeting guide sequence portion
  source 1..22: mol_type = other RNA
ttatgagtccaagggatactaa

SEQ ID NO: 18555 - RNA, 22 nt, synthetic construct
  misc_feature 1..22: note = HBV-targeting guide sequence portion
  source 1..22: mol_type = other RNA
ttatgccctgagcctgagggct

SEQ ID NO: 18556 - RNA, 22 nt, synthetic construct
  misc_feature 1..22: note = HBV-targeting guide sequence portion
  source 1..22: mol_type = other RNA
ttatgcctacagcctcctagta

SEQ ID NO: 18557 - RNA, 22 nt, synthetic construct
  misc_feature 1..22: note = HBV-targeting guide sequence portion
  source 1..22: mol_type = other RNA
ttatgcctgctaggttttatcc

SEQ ID NO: 18558 - RNA, 22 nt, synthetic construct
  misc_feature 1..22: note = HBV-targeting guide sequence portion
  source 1..22: mol_type = other RNA
ttatgtaagaccttgggcaaga

SEQ ID NO: 18559 - RNA, 22 nt, synthetic construct
  misc_feature 1..22: note = HBV-targeting guide sequence portion
  source 1..22: mol_type = other RNA
ttatgtcaacactcatatgggc

SEQ ID NO: 18560 - RNA, 22 nt, synthetic construct
  misc_feature 1..22: note = HBV-targeting guide sequence portion
  source 1..22: mol_type = other RNA
ttattatccagaacatctagtt

SEQ ID NO: 18561 - RNA, 22 nt, synthetic construct
  misc_feature 1..22: note = HBV-targeting guide sequence portion
  source 1..22: mol_type = other RNA
ttattctcttaatttcatgggc

SEQ ID NO: 18562 - RNA, 22 nt, synthetic construct
  misc_feature 1..22: note = HBV-targeting guide sequence portion
  source 1..22: mol_type = other RNA
ttattcttctactgtacctgtc

SEQ ID NO: 18563 - RNA, 22 nt, synthetic construct
  misc_feature 1..22: note = HBV-targeting guide sequence portion
  source 1..22: mol_type = other RNA
ttcaaagactgtttgtttaaag

SEQ ID NO: 18564 - RNA, 22 nt, synthetic construct
  misc_feature 1..22: note = HBV-targeting guide sequence portion
  source 1..22: mol_type = other RNA
ttcaaccgtcttttctcattaa

SEQ ID NO: 18565 - RNA, 22 nt, synthetic construct
  misc_feature 1..22: note = HBV-targeting guide sequence portion
  source 1..22: mol_type = other RNA
ttcaagcctccaagctgtgcct

SEQ ID NO: 18566 - RNA, 22 nt, synthetic construct
  misc_feature 1..22: note = HBV-targeting guide sequence portion
  source 1..22: mol_type = other RNA
ttcaatcccaacaaggatccct

SEQ ID NO: 18567 - RNA, 22 nt, synthetic construct
  misc_feature 1..22: note = HBV-targeting guide sequence portion
  source 1..22: mol_type = other RNA
ttcaatctaagcaggctttcac

SEQ ID NO: 18568 - RNA, 22 nt, synthetic construct
  misc_feature 1..22: note = HBV-targeting guide sequence portion
  source 1..22: mol_type = other RNA
ttcacatttcttgtcttacttt

SEQ ID NO: 18569 - RNA, 22 nt, synthetic construct
  misc_feature 1..22: note = HBV-targeting guide sequence portion
  source 1..22: mol_type = other RNA
ttcacattttttgataatatct

SEQ ID NO: 18570 - RNA, 22 nt, synthetic construct
  misc_feature 1..22: note = HBV-targeting guide sequence portion
  source 1..22: mol_type = other RNA
ttcaccaaatacttgcccttgg

SEQ ID NO: 18571 - RNA, 22 nt, synthetic construct
  misc_feature 1..22: note = HBV-targeting guide sequence portion
  source 1..22: mol_type = other RNA
ttcaccccaccgcacggaggcc

SEQ ID NO: 18572 - RNA, 22 nt, synthetic construct
  misc_feature 1..22: note = HBV-targeting guide sequence portion
  source 1..22: mol_type = other RNA
ttcacctcaccatactgcactc

SEQ ID NO: 18573 - RNA, 22 nt, synthetic construct
  misc_feature 1..22: note = HBV-targeting guide sequence portion
  source 1..22: mol_type = other RNA
ttcacctctgcacgtcgcatgg

SEQ ID NO: 18574 - RNA, 22 nt, synthetic construct
  misc_feature 1..22: note = HBV-targeting guide sequence portion
  source 1..22: mol_type = other RNA
ttcacctctgcctaatcatctc

SEQ ID NO: 18575 - RNA, 22 nt, synthetic construct
  misc_feature 1..22: note = HBV-targeting guide sequence portion
  source 1..22: mol_type = other RNA
ttcacggtggtctccatgcgac

SEQ ID NO: 18576 - RNA, 22 nt, synthetic construct
  misc_feature 1..22: note = HBV-targeting guide sequence portion
  source 1..22: mol_type = other RNA
ttcactttttcgccaacttaca

SEQ ID NO: 18577 - RNA, 22 nt, synthetic construct
  misc_feature 1..22: note = HBV-targeting guide sequence portion
  source 1..22: mol_type = other RNA
ttcagaaaactcccggttaaca

SEQ ID NO: 18578 - RNA, 22 nt, synthetic construct
  misc_feature 1..22: note = HBV-targeting guide sequence portion
  source 1..22: mol_type = other RNA
ttcagacaactattgtggtttc

SEQ ID NO: 18579 - RNA, 22 nt, synthetic construct
  misc_feature 1..22: note = HBV-targeting guide sequence portion
  source 1..22: mol_type = other RNA
ttcagagcaaactccaacaatc

SEQ ID NO: 18580 - RNA, 22 nt, synthetic construct
  misc_feature 1..22: note = HBV-targeting guide sequence portion
  source 1..22: mol_type = other RNA
ttcagcgcagggtccccaatcc

SEQ ID NO: 18581 - RNA, 22 nt, synthetic construct
  misc_feature 1..22: note = HBV-targeting guide sequence portion
  source 1..22: mol_type = other RNA
ttcagcgccgacgggacgtaaa

SEQ ID NO: 18582 - RNA, 22 nt, synthetic construct
  misc_feature 1..22: note = HBV-targeting guide sequence portion
  source 1..22: mol_type = other RNA
ttcaggaacagtaaaccctgtt

SEQ ID NO: 18583 - RNA, 22 nt, synthetic construct
  misc_feature 1..22: note = HBV-targeting guide sequence portion
  source 1..22: mol_type = other RNA
ttcaggtattgtttacacagaa

SEQ ID NO: 18584 - RNA, 22 nt, synthetic construct
  misc_feature 1..22: note = HBV-targeting guide sequence portion
  source 1..22: mol_type = other RNA
ttcagtggttcgtagggctttc

SEQ ID NO: 18585 - RNA, 22 nt, synthetic construct
  misc_feature 1..22: note = HBV-targeting guide sequence portion
  source 1..22: mol_type = other RNA
ttcagttatatggatgatgtgg

SEQ ID NO: 18586 - RNA, 22 nt, synthetic construct
  misc_feature 1..22: note = HBV-targeting guide sequence portion
  source 1..22: mol_type = other RNA
ttcatcctgctgctatgcctca

SEQ ID NO: 18587 - RNA, 22 nt, synthetic construct
  misc_feature 1..22: note = HBV-targeting guide sequence portion
  source 1..22: mol_type = other RNA
ttcatgggctatgtcattgatt

SEQ ID NO: 18588 - RNA, 22 nt, synthetic construct
  misc_feature 1..22: note = HBV-targeting guide sequence portion
  source 1..22: mol_type = other RNA
ttcatgtcctactgttcaagcc

SEQ ID NO: 18589 - RNA, 22 nt, synthetic construct
  misc_feature 1..22: note = HBV-targeting guide sequence portion
  source 1..22: mol_type = other RNA
ttccaaaagtaagacaagaaat

SEQ ID NO: 18590 - RNA, 22 nt, synthetic construct
  misc_feature 1..22: note = HBV-targeting guide sequence portion
  source 1..22: mol_type = other RNA
ttccaaactagacactatttac

SEQ ID NO: 18591 - RNA, 22 nt, synthetic construct
  misc_feature 1..22: note = HBV-targeting guide sequence portion
  source 1..22: mol_type = other RNA
ttccaatcaataggcctgttaa

SEQ ID NO: 18592 - RNA, 22 nt, synthetic construct
  misc_feature 1..22: note = HBV-targeting guide sequence portion
  source 1..22: mol_type = other RNA
ttccaatgagggttaaagacag

SEQ ID NO: 18593 - RNA, 22 nt, synthetic construct
  misc_feature 1..22: note = HBV-targeting guide sequence portion
  source 1..22: mol_type = other RNA
ttccaccaaactctgcaagatc

SEQ ID NO: 18594 - RNA, 22 nt, synthetic construct
  misc_feature 1..22: note = HBV-targeting guide sequence portion
  source 1..22: mol_type = other RNA
ttccaccagcaatcctctggga

SEQ ID NO: 18595 - RNA, 22 nt, synthetic construct
  misc_feature 1..22: note = HBV-targeting guide sequence portion
  source 1..22: mol_type = other RNA
ttccacgcatgcgctgatggcc

SEQ ID NO: 18596 - RNA, 22 nt, synthetic construct
  misc_feature 1..22: note = HBV-targeting guide sequence portion
  source 1..22: mol_type = other RNA
ttccaggatcatcaaccaccag

SEQ ID NO: 18597 - RNA, 22 nt, synthetic construct
  misc_feature 1..22: note = HBV-targeting guide sequence portion
  source 1..22: mol_type = other RNA
ttccatagagtgtgtaaatagt

SEQ ID NO: 18598 - RNA, 22 nt, synthetic construct
  misc_feature 1..22: note = HBV-targeting guide sequence portion
  source 1..22: mol_type = other RNA
ttccatccgaaggttttgtaca

SEQ ID NO: 18599 - RNA, 22 nt, synthetic construct
  misc_feature 1..22: note = HBV-targeting guide sequence portion
  source 1..22: mol_type = other RNA
ttcccaagaatatggtgaccca

SEQ ID NO: 18600 - RNA, 22 nt, synthetic construct
  misc_feature 1..22: note = HBV-targeting guide sequence portion
  source 1..22: mol_type = other RNA
ttcccaccttatgagtccaagg

SEQ ID NO: 18601 - RNA, 22 nt, synthetic construct
  misc_feature 1..22: note = HBV-targeting guide sequence portion
  source 1..22: mol_type = other RNA
ttcccatcccatcatcctgggc

SEQ ID NO: 18602 - RNA, 22 nt, synthetic construct
  misc_feature 1..22: note = HBV-targeting guide sequence portion
  source 1..22: mol_type = other RNA
ttcccatggctgctaggctgtg

SEQ ID NO: 18603 - RNA, 22 nt, synthetic construct
  misc_feature 1..22: note = HBV-targeting guide sequence portion
  source 1..22: mol_type = other RNA
ttcccccactgtttggctttca

SEQ ID NO: 18604 - RNA, 22 nt, synthetic construct
  misc_feature 1..22: note = HBV-targeting guide sequence portion
  source 1..22: mol_type = other RNA
ttccccctagaaaattgagaga

SEQ ID NO: 18605 - RNA, 22 nt, synthetic construct
  misc_feature 1..22: note = HBV-targeting guide sequence portion
  source 1..22: mol_type = other RNA
ttcccgaccaccagttggaccc

SEQ ID NO: 18606 - RNA, 22 nt, synthetic construct
  misc_feature 1..22: note = HBV-targeting guide sequence portion
  source 1..22: mol_type = other RNA
ttcccgtctgtcctctaattcc

SEQ ID NO: 18607 - RNA, 22 nt, synthetic construct
  misc_feature 1..22: note = HBV-targeting guide sequence portion
  source 1..22: mol_type = other RNA
ttccgaaagcccaggatgatgg

SEQ ID NO: 18608 - RNA, 22 nt, synthetic construct
  misc_feature 1..22: note = HBV-targeting guide sequence portion
  source 1..22: mol_type = other RNA
ttccgaccgaccacggggcgca

SEQ ID NO: 18609 - RNA, 22 nt, synthetic construct
  misc_feature 1..22: note = HBV-targeting guide sequence portion
  source 1..22: mol_type = other RNA
ttccgactactgcctctcacat

SEQ ID NO: 18610 - RNA, 22 nt, synthetic construct
  misc_feature 1..22: note = HBV-targeting guide sequence portion
  source 1..22: mol_type = other RNA
ttccgcagtatggatcggcaga

SEQ ID NO: 18611 - RNA, 22 nt, synthetic construct
  misc_feature 1..22: note = HBV-targeting guide sequence portion
  source 1..22: mol_type = other RNA
ttccggagacttgtgttgttag

SEQ ID NO: 18612 - RNA, 22 nt, synthetic construct
  misc_feature 1..22: note = HBV-targeting guide sequence portion
  source 1..22: mol_type = other RNA
ttccggctcctctgccgatcca

SEQ ID NO: 18613 - RNA, 22 nt, synthetic construct
  misc_feature 1..22: note = HBV-targeting guide sequence portion
  source 1..22: mol_type = other RNA
ttccgtacgagatcttctagat

SEQ ID NO: 18614 - RNA, 22 nt, synthetic construct
  misc_feature 1..22: note = HBV-targeting guide sequence portion
  source 1..22: mol_type = other RNA
ttcctaatatacatctacacca

SEQ ID NO: 18615 - RNA, 22 nt, synthetic construct
  misc_feature 1..22: note = HBV-targeting guide sequence portion
  source 1..22: mol_type = other RNA
ttcctaggacccctgctcgtgt

SEQ ID NO: 18616 - RNA, 22 nt, synthetic construct
  misc_feature 1..22: note = HBV-targeting guide sequence portion
  source 1..22: mol_type = other RNA
ttcctatgggagtgggcctcag

SEQ ID NO: 18617 - RNA, 22 nt, synthetic construct
  misc_feature 1..22: note = HBV-targeting guide sequence portion
  source 1..22: mol_type = other RNA
ttcctcttcatcctgctgctat

SEQ ID NO: 18618 - RNA, 22 nt, synthetic construct
  misc_feature 1..22: note = HBV-targeting guide sequence portion
  source 1..22: mol_type = other RNA
ttcctgaactggagccaccagc

SEQ ID NO: 18619 - RNA, 22 nt, synthetic construct
  misc_feature 1..22: note = HBV-targeting guide sequence portion
  source 1..22: mol_type = other RNA
ttccttccgtacgagatcttct

SEQ ID NO: 18620 - RNA, 22 nt, synthetic construct
  misc_feature 1..22: note = HBV-targeting guide sequence portion
  source 1..22: mol_type = other RNA
ttccttgagcaggagtcgtgca

SEQ ID NO: 18621 - RNA, 22 nt, synthetic construct
  misc_feature 1..22: note = HBV-targeting guide sequence portion
  source 1..22: mol_type = other RNA
ttccttgttgacaagaatcctc

SEQ ID NO: 18622 - RNA, 22 nt, synthetic construct
  misc_feature 1..22: note = HBV-targeting guide sequence portion
  source 1..22: mol_type = other RNA
ttcgcactcctccagcttatag

SEQ ID NO: 18623 - RNA, 22 nt, synthetic construct
  misc_feature 1..22: note = HBV-targeting guide sequence portion
  source 1..22: mol_type = other RNA
ttcgcagtccccaacctccaat

SEQ ID NO: 18624 - RNA, 22 nt, synthetic construct
  misc_feature 1..22: note = HBV-targeting guide sequence portion
  source 1..22: mol_type = other RNA
ttcgccaacttacaaggccttt

SEQ ID NO: 18625 - RNA, 22 nt, synthetic construct
  misc_feature 1..22: note = HBV-targeting guide sequence portion
  source 1..22: mol_type = other RNA
ttcgcttcacctctgcacgtcg

SEQ ID NO: 18626 - RNA, 22 nt, synthetic construct
  misc_feature 1..22: note = HBV-targeting guide sequence portion
  source 1..22: mol_type = other RNA
ttcggaaaattcctatgggagt

SEQ ID NO: 18627 - RNA, 22 nt, synthetic construct
  misc_feature 1..22: note = HBV-targeting guide sequence portion
  source 1..22: mol_type = other RNA
ttcggatggaaactgcacctgt

SEQ ID NO: 18628 - RNA, 22 nt, synthetic construct
  misc_feature 1..22: note = HBV-targeting guide sequence portion
  source 1..22: mol_type = other RNA
ttcgggctagggttcaccccac

SEQ ID NO: 18629 - RNA, 22 nt, synthetic construct
  misc_feature 1..22: note = HBV-targeting guide sequence portion
  source 1..22: mol_type = other RNA
ttcgtagggctttcccccactg

SEQ ID NO: 18630 - RNA, 22 nt, synthetic construct
  misc_feature 1..22: note = HBV-targeting guide sequence portion
  source 1..22: mol_type = other RNA
ttcgtctgcgaggcgagggagt

SEQ ID NO: 18631 - RNA, 22 nt, synthetic construct
  misc_feature 1..22: note = HBV-targeting guide sequence portion
  source 1..22: mol_type = other RNA
ttcgttgacacactttccaatc

SEQ ID NO: 18632 - RNA, 22 nt, synthetic construct
  misc_feature 1..22: note = HBV-targeting guide sequence portion
  source 1..22: mol_type = other RNA
ttctaaattagtacccacccag

SEQ ID NO: 18633 - RNA, 22 nt, synthetic construct
  misc_feature 1..22: note = HBV-targeting guide sequence portion
  source 1..22: mol_type = other RNA
ttctactgtacctgtctttaac

SEQ ID NO: 18634 - RNA, 22 nt, synthetic construct
  misc_feature 1..22: note = HBV-targeting guide sequence portion
  source 1..22: mol_type = other RNA
ttctagataccgccgcagctct

SEQ ID NO: 18635 - RNA, 22 nt, synthetic construct
  misc_feature 1..22: note = HBV-targeting guide sequence portion
  source 1..22: mol_type = other RNA
ttctaggggacctgcctcgtcg

SEQ ID NO: 18636 - RNA, 22 nt, synthetic construct
  misc_feature 1..22: note = HBV-targeting guide sequence portion
  source 1..22: mol_type = other RNA
ttctagggggaactaccgtgtg

SEQ ID NO: 18637 - RNA, 22 nt, synthetic construct
  misc_feature 1..22: note = HBV-targeting guide sequence portion
  source 1..22: mol_type = other RNA
ttctcagaggtggagacagcgg

SEQ ID NO: 18638 - RNA, 22 nt, synthetic construct
  misc_feature 1..22: note = HBV-targeting guide sequence portion
  source 1..22: mol_type = other RNA
ttctcatctgccggaccgtgtg

SEQ ID NO: 18639 - RNA, 22 nt, synthetic construct
  misc_feature 1..22: note = HBV-targeting guide sequence portion
  source 1..22: mol_type = other RNA
ttctcattaactgtaagcgggc

SEQ ID NO: 18640 - RNA, 22 nt, synthetic construct
  misc_feature 1..22: note = HBV-targeting guide sequence portion
  source 1..22: mol_type = other RNA
ttctccatgttcagcgcagggt

SEQ ID NO: 18641 - RNA, 22 nt, synthetic construct
  misc_feature 1..22: note = HBV-targeting guide sequence portion
  source 1..22: mol_type = other RNA
ttctccccagcaaagaattgct

SEQ ID NO: 18642 - RNA, 22 nt, synthetic construct
  misc_feature 1..22: note = HBV-targeting guide sequence portion
  source 1..22: mol_type = other RNA
ttctcgaggattggggaccctg

SEQ ID NO: 18643 - RNA, 22 nt, synthetic construct
  misc_feature 1..22: note = HBV-targeting guide sequence portion
  source 1..22: mol_type = other RNA
ttctcgggactgacaactctgt

SEQ ID NO: 18644 - RNA, 22 nt, synthetic construct
  misc_feature 1..22: note = HBV-targeting guide sequence portion
  source 1..22: mol_type = other RNA
ttctctcaattttctaggggga

SEQ ID NO: 18645 - RNA, 22 nt, synthetic construct
  misc_feature 1..22: note = HBV-targeting guide sequence portion
  source 1..22: mol_type = other RNA
ttctctgcctgccgttccgacc

SEQ ID NO: 18646 - RNA, 22 nt, synthetic construct
  misc_feature 1..22: note = HBV-targeting guide sequence portion
  source 1..22: mol_type = other RNA
ttctcttaatttcatgggctat

SEQ ID NO: 18647 - RNA, 22 nt, synthetic construct
  misc_feature 1..22: note = HBV-targeting guide sequence portion
  source 1..22: mol_type = other RNA
ttctcttccaaaagtaagacaa

SEQ ID NO: 18648 - RNA, 22 nt, synthetic construct
  misc_feature 1..22: note = HBV-targeting guide sequence portion
  source 1..22: mol_type = other RNA
ttctcttggctcagtttactag

SEQ ID NO: 18649 - RNA, 22 nt, synthetic construct
  misc_feature 1..22: note = HBV-targeting guide sequence portion
  source 1..22: mol_type = other RNA
ttctgaaacattctttgatttt

SEQ ID NO: 18650 - RNA, 22 nt, synthetic construct
  misc_feature 1..22: note = HBV-targeting guide sequence portion
  source 1..22: mol_type = other RNA
ttctgacttctttccttccgta

SEQ ID NO: 18651 - RNA, 22 nt, synthetic construct
  misc_feature 1..22: note = HBV-targeting guide sequence portion
  source 1..22: mol_type = other RNA
ttctgcagggtcccgtgctggt

SEQ ID NO: 18652 - RNA, 22 nt, synthetic construct
  misc_feature 1..22: note = HBV-targeting guide sequence portion
  source 1..22: mol_type = other RNA
ttctgccccatgctgtagctct

SEQ ID NO: 18653 - RNA, 22 nt, synthetic construct
  misc_feature 1..22: note = HBV-targeting guide sequence portion
  source 1..22: mol_type = other RNA
ttctgcgacgcggcgattgaga

SEQ ID NO: 18654 - RNA, 22 nt, synthetic construct
  misc_feature 1..22: note = HBV-targeting guide sequence portion
  source 1..22: mol_type = other RNA
ttctggactatcaaggtatgtt

SEQ ID NO: 18655 - RNA, 22 nt, synthetic construct
  misc_feature 1..22: note = HBV-targeting guide sequence portion
  source 1..22: mol_type = other RNA
ttctggataataaggtttaata

SEQ ID NO: 18656 - RNA, 22 nt, synthetic construct
  misc_feature 1..22: note = HBV-targeting guide sequence portion
  source 1..22: mol_type = other RNA
ttctgggttttgctgccccttt

SEQ ID NO: 18657 - RNA, 22 nt, synthetic construct
  misc_feature 1..22: note = HBV-targeting guide sequence portion
  source 1..22: mol_type = other RNA
ttctgtgggtcaccatattctt

SEQ ID NO: 18658 - RNA, 22 nt, synthetic construct
  misc_feature 1..22: note = HBV-targeting guide sequence portion
  source 1..22: mol_type = other RNA
ttctgtgtaaacaatacctgaa

SEQ ID NO: 18659 - RNA, 22 nt, synthetic construct
  misc_feature 1..22: note = HBV-targeting guide sequence portion
  source 1..22: mol_type = other RNA
ttcttctactgtacctgtcttt

SEQ ID NO: 18660 - RNA, 22 nt, synthetic construct
  misc_feature 1..22: note = HBV-targeting guide sequence portion
  source 1..22: mol_type = other RNA
ttcttctaggggacctgcctcg

SEQ ID NO: 18661 - RNA, 22 nt, synthetic construct
  misc_feature 1..22: note = HBV-targeting guide sequence portion
  source 1..22: mol_type = other RNA
ttcttctggactatcaaggtat

SEQ ID NO: 18662 - RNA, 22 nt, synthetic construct
  misc_feature 1..22: note = HBV-targeting guide sequence portion
  source 1..22: mol_type = other RNA
ttcttcttctaggggacctgcc

SEQ ID NO: 18663 - RNA, 22 nt, synthetic construct
  misc_feature 1..22: note = HBV-targeting guide sequence portion
  source 1..22: mol_type = other RNA
ttcttgcccaaggtcttacata

SEQ ID NO: 18664 - RNA, 22 nt, synthetic construct
  misc_feature 1..22: note = HBV-targeting guide sequence portion
  source 1..22: mol_type = other RNA
ttcttgggaacaagagctacag

SEQ ID NO: 18665 - RNA, 22 nt, synthetic construct
  misc_feature 1..22: note = HBV-targeting guide sequence portion
  source 1..22: mol_type = other RNA
ttcttgtcaacaaggaaaaccc

SEQ ID NO: 18666 - RNA, 22 nt, synthetic construct
  misc_feature 1..22: note = HBV-targeting guide sequence portion
  source 1..22: mol_type = other RNA
ttcttgtcttacttttggaaga

SEQ ID NO: 18667 - RNA, 22 nt, synthetic construct
  misc_feature 1..22: note = HBV-targeting guide sequence portion
  source 1..22: mol_type = other RNA
ttcttgttggttcttctggact

SEQ ID NO: 18668 - RNA, 22 nt, synthetic construct
  misc_feature 1..22: note = HBV-targeting guide sequence portion
  source 1..22: mol_type = other RNA
ttctttatatgggtcaatgtcc

SEQ ID NO: 18669 - RNA, 22 nt, synthetic construct
  misc_feature 1..22: note = HBV-targeting guide sequence portion
  source 1..22: mol_type = other RNA
ttctttcccgaccaccagttgg

SEQ ID NO: 18670 - RNA, 22 nt, synthetic construct
  misc_feature 1..22: note = HBV-targeting guide sequence portion
  source 1..22: mol_type = other RNA
ttctttccttccgtacgagatc

SEQ ID NO: 18671 - RNA, 22 nt, synthetic construct
  misc_feature 1..22: note = HBV-targeting guide sequence portion
  source 1..22: mol_type = other RNA
ttctttgattttgtgtatgatg

SEQ ID NO: 18672 - RNA, 22 nt, synthetic construct
  misc_feature 1..22: note = HBV-targeting guide sequence portion
  source 1..22: mol_type = other RNA
ttctttgctggggagaactaat

SEQ ID NO: 18673 - RNA, 22 nt, synthetic construct
  misc_feature 1..22: note = HBV-targeting guide sequence portion
  source 1..22: mol_type = other RNA
ttcttttgtctttgggtgtaca

SEQ ID NO: 18674 - RNA, 22 nt, synthetic construct
  misc_feature 1..22: note = HBV-targeting guide sequence portion
  source 1..22: mol_type = other RNA
ttgaaattgattatgcctgcta

SEQ ID NO: 18675 - RNA, 22 nt, synthetic construct
  misc_feature 1..22: note = HBV-targeting guide sequence portion
  source 1..22: mol_type = other RNA
ttgaacagtaggacatgaacaa

SEQ ID NO: 18676 - RNA, 22 nt, synthetic construct
  misc_feature 1..22: note = HBV-targeting guide sequence portion
  source 1..22: mol_type = other RNA
ttgaagtatgcctcaaggtcgg

SEQ ID NO: 18677 - RNA, 22 nt, synthetic construct
  misc_feature 1..22: note = HBV-targeting guide sequence portion
  source 1..22: mol_type = other RNA
ttgaagtcccaatctggattgt

SEQ ID NO: 18678 - RNA, 22 nt, synthetic construct
  misc_feature 1..22: note = HBV-targeting guide sequence portion
  source 1..22: mol_type = other RNA
ttgaatacatgcatacaagggc

SEQ ID NO: 18679 - RNA, 22 nt, synthetic construct
  misc_feature 1..22: note = HBV-targeting guide sequence portion
  source 1..22: mol_type = other RNA
ttgacaagaatcctcacaatac

SEQ ID NO: 18680 - RNA, 22 nt, synthetic construct
  misc_feature 1..22: note = HBV-targeting guide sequence portion
  source 1..22: mol_type = other RNA
ttgacacactttccaatcaata

SEQ ID NO: 18681 - RNA, 22 nt, synthetic construct
  misc_feature 1..22: note = HBV-targeting guide sequence portion
  source 1..22: mol_type = other RNA
ttgacactctcttatataaaac

SEQ ID NO: 18682 - RNA, 22 nt, synthetic construct
  misc_feature 1..22: note = HBV-targeting guide sequence portion
  source 1..22: mol_type = other RNA
ttgacataactgactactaggt

SEQ ID NO: 18683 - RNA, 22 nt, synthetic construct
  misc_feature 1..22: note = HBV-targeting guide sequence portion
  source 1..22: mol_type = other RNA
ttgacattgcagagagtccaag

SEQ ID NO: 18684 - RNA, 22 nt, synthetic construct
  misc_feature 1..22: note = HBV-targeting guide sequence portion
  source 1..22: mol_type = other RNA
ttgacccatataaagaatttgg

SEQ ID NO: 18685 - RNA, 22 nt, synthetic construct
  misc_feature 1..22: note = HBV-targeting guide sequence portion
  source 1..22: mol_type = other RNA
ttgacgatatgtgagaggcagt

SEQ ID NO: 18686 - RNA, 22 nt, synthetic construct
  misc_feature 1..22: note = HBV-targeting guide sequence portion
  source 1..22: mol_type = other RNA
ttgagagaagtccaccacgagt

SEQ ID NO: 18687 - RNA, 22 nt, synthetic construct
  misc_feature 1..22: note = HBV-targeting guide sequence portion
  source 1..22: mol_type = other RNA
ttgagatccccgagattgagat

SEQ ID NO: 18688 - RNA, 22 nt, synthetic construct
  misc_feature 1..22: note = HBV-targeting guide sequence portion
  source 1..22: mol_type = other RNA
ttgagatcttcgtctgcgaggc

SEQ ID NO: 18689 - RNA, 22 nt, synthetic construct
  misc_feature 1..22: note = HBV-targeting guide sequence portion
  source 1..22: mol_type = other RNA
ttgagatcttctgcgacgcggc

SEQ ID NO: 18690 - RNA, 22 nt, synthetic construct
  misc_feature 1..22: note = HBV-targeting guide sequence portion
  source 1..22: mol_type = other RNA
ttgagcaggagtcgtgcaggtt

SEQ ID NO: 18691 - RNA, 22 nt, synthetic construct
  misc_feature 1..22: note = HBV-targeting guide sequence portion
  source 1..22: mol_type = other RNA
ttgaggcatacttcaaagactg

SEQ ID NO: 18692 - RNA, 22 nt, synthetic construct
  misc_feature 1..22: note = HBV-targeting guide sequence portion
  source 1..22: mol_type = other RNA
ttgagtccctttataccgctgt

SEQ ID NO: 18693 - RNA, 22 nt, synthetic construct
  misc_feature 1..22: note = HBV-targeting guide sequence portion
  source 1..22: mol_type = other RNA
ttgataatatcttggtgtagat

SEQ ID NO: 18694 - RNA, 22 nt, synthetic construct
  misc_feature 1..22: note = HBV-targeting guide sequence portion
  source 1..22: mol_type = other RNA
ttgataggataggggcatttgg

SEQ ID NO: 18695 - RNA, 22 nt, synthetic construct
  misc_feature 1..22: note = HBV-targeting guide sequence portion
  source 1..22: mol_type = other RNA
ttgatagtccagaagaaccaac

SEQ ID NO: 18696 - RNA, 22 nt, synthetic construct
  misc_feature 1..22: note = HBV-targeting guide sequence portion
  source 1..22: mol_type = other RNA
ttgatcttctaaattagtaccc

SEQ ID NO: 18697 - RNA, 22 nt, synthetic construct
  misc_feature 1..22: note = HBV-targeting guide sequence portion
  source 1..22: mol_type = other RNA
ttgatgatcctggaattagagg

SEQ ID NO: 18698 - RNA, 22 nt, synthetic construct
  misc_feature 1..22: note = HBV-targeting guide sequence portion
  source 1..22: mol_type = other RNA
ttgattatgcctgctaggtttt

SEQ ID NO: 18699 - RNA, 22 nt, synthetic construct
  misc_feature 1..22: note = HBV-targeting guide sequence portion
  source 1..22: mol_type = other RNA
ttgattggaaagtgtgtcaacg

SEQ ID NO: 18700 - RNA, 22 nt, synthetic construct
  misc_feature 1..22: note = HBV-targeting guide sequence portion
  source 1..22: mol_type = other RNA
ttgattgttggggatcattgcc

SEQ ID NO: 18701 - RNA, 22 nt, synthetic construct
  misc_feature 1..22: note = HBV-targeting guide sequence portion
  source 1..22: mol_type = other RNA
ttgattttgtgtatgatgtgat

SEQ ID NO: 18702 - RNA, 22 nt, synthetic construct
  misc_feature 1..22: note = HBV-targeting guide sequence portion
  source 1..22: mol_type = other RNA
ttgcagagagtccaagagtcct

SEQ ID NO: 18703 - RNA, 22 nt, synthetic construct
  misc_feature 1..22: note = HBV-targeting guide sequence portion
  source 1..22: mol_type = other RNA
ttgcagagtttggtggaaggtt

SEQ ID NO: 18704 - RNA, 22 nt, synthetic construct
  misc_feature 1..22: note = HBV-targeting guide sequence portion
  source 1..22: mol_type = other RNA
ttgcatcagcaaacacttggca

SEQ ID NO: 18705 - RNA, 22 nt, synthetic construct
  misc_feature 1..22: note = HBV-targeting guide sequence portion
  source 1..22: mol_type = other RNA
ttgcatggtgctggtgcgcaga

SEQ ID NO: 18706 - RNA, 22 nt, synthetic construct
  misc_feature 1..22: note = HBV-targeting guide sequence portion
  source 1..22: mol_type = other RNA
ttgcattatgccctgagcctga

SEQ ID NO: 18707 - RNA, 22 nt, synthetic construct
  misc_feature 1..22: note = HBV-targeting guide sequence portion
  source 1..22: mol_type = other RNA
ttgccacaaaatcacatcatac

SEQ ID NO: 18708 - RNA, 22 nt, synthetic construct
  misc_feature 1..22: note = HBV-targeting guide sequence portion
  source 1..22: mol_type = other RNA
ttgccagcaaatccgcctcctg

SEQ ID NO: 18709 - RNA, 22 nt, synthetic construct
  misc_feature 1..22: note = HBV-targeting guide sequence portion
  source 1..22: mol_type = other RNA
ttgccaggcaacggccaggtct

SEQ ID NO: 18710 - RNA, 22 nt, synthetic construct
  misc_feature 1..22: note = HBV-targeting guide sequence portion
  source 1..22: mol_type = other RNA
ttgcccaaggtcttacataaga

SEQ ID NO: 18711 - RNA, 22 nt, synthetic construct
  misc_feature 1..22: note = HBV-targeting guide sequence portion
  source 1..22: mol_type = other RNA
ttgcccttggataagggtatta

SEQ ID NO: 18712 - RNA, 22 nt, synthetic construct
  misc_feature 1..22: note = HBV-targeting guide sequence portion
  source 1..22: mol_type = other RNA
ttgcctgagtgcagtatggtga

SEQ ID NO: 18713 - RNA, 22 nt, synthetic construct
  misc_feature 1..22: note = HBV-targeting guide sequence portion
  source 1..22: mol_type = other RNA
ttgcctggcaacggggtaaagg

SEQ ID NO: 18714 - RNA, 22 nt, synthetic construct
  misc_feature 1..22: note = HBV-targeting guide sequence portion
  source 1..22: mol_type = other RNA
ttgccttctgacttctttcctt

SEQ ID NO: 18715 - RNA, 22 nt, synthetic construct
  misc_feature 1..22: note = HBV-targeting guide sequence portion
  source 1..22: mol_type = other RNA
ttgcgggagaggacaacagagt

SEQ ID NO: 18716 - RNA, 22 nt, synthetic construct
  misc_feature 1..22: note = HBV-targeting guide sequence portion
  source 1..22: mol_type = other RNA
ttgctccagaccggctgcgagc

SEQ ID NO: 18717 - RNA, 22 nt, synthetic construct
  misc_feature 1..22: note = HBV-targeting guide sequence portion
  source 1..22: mol_type = other RNA
ttgctcgcagccggtctggagc

SEQ ID NO: 18718 - RNA, 22 nt, synthetic construct
  misc_feature 1..22: note = HBV-targeting guide sequence portion
  source 1..22: mol_type = other RNA
ttgctctgaaggctgggtccaa

SEQ ID NO: 18719 - RNA, 22 nt, synthetic construct
  misc_feature 1..22: note = HBV-targeting guide sequence portion
  source 1..22: mol_type = other RNA
ttgctgatgcaacccccactgg

SEQ ID NO: 18720 - RNA, 22 nt, synthetic construct
  misc_feature 1..22: note = HBV-targeting guide sequence portion
  source 1..22: mol_type = other RNA
ttgctgccccttttacacaatg

SEQ ID NO: 18721 - RNA, 22 nt, synthetic construct
  misc_feature 1..22: note = HBV-targeting guide sequence portion
  source 1..22: mol_type = other RNA
ttgctggcaaggtttgcattat

SEQ ID NO: 18722 - RNA, 22 nt, synthetic construct
  misc_feature 1..22: note = HBV-targeting guide sequence portion
  source 1..22: mol_type = other RNA
ttgctggggagaactaatgact

SEQ ID NO: 18723 - RNA, 22 nt, synthetic construct
  misc_feature 1..22: note = HBV-targeting guide sequence portion
  source 1..22: mol_type = other RNA
ttgctggtggaaagattctgcc

SEQ ID NO: 18724 - RNA, 22 nt, synthetic construct
  misc_feature 1..22: note = HBV-targeting guide sequence portion
  source 1..22: mol_type = other RNA
ttgctgtacaaaaccttcggat

SEQ ID NO: 18725 - RNA, 22 nt, synthetic construct
  misc_feature 1..22: note = HBV-targeting guide sequence portion
  source 1..22: mol_type = other RNA
ttgcttgcctgagtgcagtatg

SEQ ID NO: 18726 - RNA, 22 nt, synthetic construct
  misc_feature 1..22: note = HBV-targeting guide sequence portion
  source 1..22: mol_type = other RNA
ttggaaaacaccctcttttcct

SEQ ID NO: 18727 - RNA, 22 nt, synthetic construct
  misc_feature 1..22: note = HBV-targeting guide sequence portion
  source 1..22: mol_type = other RNA
ttggaaagtgtgtcaacgaatt

SEQ ID NO: 18728 - RNA, 22 nt, synthetic construct
  misc_feature 1..22: note = HBV-targeting guide sequence portion
  source 1..22: mol_type = other RNA
ttggaagagaaacggtcctaga

SEQ ID NO: 18729 - RNA, 22 nt, synthetic construct
  misc_feature 1..22: note = HBV-targeting guide sequence portion
  source 1..22: mol_type = other RNA
ttggaagtaatgattaactaga

SEQ ID NO: 18730 - RNA, 22 nt, synthetic construct
  misc_feature 1..22: note = HBV-targeting guide sequence portion
  source 1..22: mol_type = other RNA
ttggacccagccttcagagcaa

SEQ ID NO: 18731 - RNA, 22 nt, synthetic construct
  misc_feature 1..22: note = HBV-targeting guide sequence portion
  source 1..22: mol_type = other RNA
ttggactcataaggtgggaaat

SEQ ID NO: 18732 - RNA, 22 nt, synthetic construct
  misc_feature 1..22: note = HBV-targeting guide sequence portion
  source 1..22: mol_type = other RNA
ttggactctctgcaatgtcaac

SEQ ID NO: 18733 - RNA, 22 nt, synthetic construct
  misc_feature 1..22: note = HBV-targeting guide sequence portion
  source 1..22: mol_type = other RNA
ttggagctactgtggagttact

SEQ ID NO: 18734 - RNA, 22 nt, synthetic construct
  misc_feature 1..22: note = HBV-targeting guide sequence portion
  source 1..22: mol_type = other RNA
ttggaggacaggaggttggtga

SEQ ID NO: 18735 - RNA, 22 nt, synthetic construct
  misc_feature 1..22: note = HBV-targeting guide sequence portion
  source 1..22: mol_type = other RNA
ttggaggcttgaacagtaggac

SEQ ID NO: 18736 - RNA, 22 nt, synthetic construct
  misc_feature 1..22: note = HBV-targeting guide sequence portion
  source 1..22: mol_type = other RNA
ttggaggttggggactgcgaat

SEQ ID NO: 18737 - RNA, 22 nt, synthetic construct
  misc_feature 1..22: note = HBV-targeting guide sequence portion
  source 1..22: mol_type = other RNA
ttggagtctcctgagcattgtt

SEQ ID NO: 18738 - RNA, 22 nt, synthetic construct
  misc_feature 1..22: note = HBV-targeting guide sequence portion
  source 1..22: mol_type = other RNA
ttggagtgtggattcgcactcc

SEQ ID NO: 18739 - RNA, 22 nt, synthetic construct
  misc_feature 1..22: note = HBV-targeting guide sequence portion
  source 1..22: mol_type = other RNA
ttggagtttgctctgaaggctg

SEQ ID NO: 18740 - RNA, 22 nt, synthetic construct
  misc_feature 1..22: note = HBV-targeting guide sequence portion
  source 1..22: mol_type = other RNA
ttggataagggtattaaacctt

SEQ ID NO: 18741 - RNA, 22 nt, synthetic construct
  misc_feature 1..22: note = HBV-targeting guide sequence portion
  source 1..22: mol_type = other RNA
ttggcacagacctggccgttgc

SEQ ID NO: 18742 - RNA, 22 nt, synthetic construct
  misc_feature 1..22: note = HBV-targeting guide sequence portion
  source 1..22: mol_type = other RNA
ttggcagcacagcctagcagcc

SEQ ID NO: 18743 - RNA, 22 nt, synthetic construct
  misc_feature 1..22: note = HBV-targeting guide sequence portion
  source 1..22: mol_type = other RNA
ttggccaaaattcgcagtcccc

SEQ ID NO: 18744 - RNA, 22 nt, synthetic construct
  misc_feature 1..22: note = HBV-targeting guide sequence portion
  source 1..22: mol_type = other RNA
ttggccaagacacacggtagtt

SEQ ID NO: 18745 - RNA, 22 nt, synthetic construct
  misc_feature 1..22: note = HBV-targeting guide sequence portion
  source 1..22: mol_type = other RNA
ttggcccccaataccacatcat

SEQ ID NO: 18746 - RNA, 22 nt, synthetic construct
  misc_feature 1..22: note = HBV-targeting guide sequence portion
  source 1..22: mol_type = other RNA
ttggcgaaaaagtgaaagcctg

SEQ ID NO: 18747 - RNA, 22 nt, synthetic construct
  misc_feature 1..22: note = HBV-targeting guide sequence portion
  source 1..22: mol_type = other RNA
ttggcgtctggccagggatcct

SEQ ID NO: 18748 - RNA, 22 nt, synthetic construct
  misc_feature 1..22: note = HBV-targeting guide sequence portion
  source 1..22: mol_type = other RNA
ttggctcagtttactagtgcca

SEQ ID NO: 18749 - RNA, 22 nt, synthetic construct
  misc_feature 1..22: note = HBV-targeting guide sequence portion
  source 1..22: mol_type = other RNA
ttggctttcagttatatggatg

SEQ ID NO: 18750 - RNA, 22 nt, synthetic construct
  misc_feature 1..22: note = HBV-targeting guide sequence portion
  source 1..22: mol_type = other RNA
ttgggaacaagagctacagcat

SEQ ID NO: 18751 - RNA, 22 nt, synthetic construct
  misc_feature 1..22: note = HBV-targeting guide sequence portion
  source 1..22: mol_type = other RNA
ttgggacttcaatcccaacaag

SEQ ID NO: 18752 - RNA, 22 nt, synthetic construct
  misc_feature 1..22: note = HBV-targeting guide sequence portion
  source 1..22: mol_type = other RNA
ttgggattgaagtcccaatctg

SEQ ID NO: 18753 - RNA, 22 nt, synthetic construct
  misc_feature 1..22: note = HBV-targeting guide sequence portion
  source 1..22: mol_type = other RNA
ttgggcaagaattggtgggcgt

SEQ ID NO: 18754 - RNA, 22 nt, synthetic construct
  misc_feature 1..22: note = HBV-targeting guide sequence portion
  source 1..22: mol_type = other RNA
ttggggaccctgcgctgaacat

SEQ ID NO: 18755 - RNA, 22 nt, synthetic construct
  misc_feature 1..22: note = HBV-targeting guide sequence portion
  source 1..22: mol_type = other RNA
ttggggactgcgaattttggcc

SEQ ID NO: 18756 - RNA, 22 nt, synthetic construct
  misc_feature 1..22: note = HBV-targeting guide sequence portion
  source 1..22: mol_type = other RNA
ttggggatcattgccacaaaat

SEQ ID NO: 18757 - RNA, 22 nt, synthetic construct
  misc_feature 1..22: note = HBV-targeting guide sequence portion
  source 1..22: mol_type = other RNA
ttggggccctgtcgtcctcttc

SEQ ID NO: 18758 - RNA, 22 nt, synthetic construct
  misc_feature 1..22: note = HBV-targeting guide sequence portion
  source 1..22: mol_type = other RNA
ttggggcttggtcataggccat

SEQ ID NO: 18759 - RNA, 22 nt, synthetic construct
  misc_feature 1..22: note = HBV-targeting guide sequence portion
  source 1..22: mol_type = other RNA
ttgggggaggagattagattaa

SEQ ID NO: 18760 - RNA, 22 nt, synthetic construct
  misc_feature 1..22: note = HBV-targeting guide sequence portion
  source 1..22: mol_type = other RNA
ttgggggccaagtctgtacagc

SEQ ID NO: 18761 - RNA, 22 nt, synthetic construct
  misc_feature 1..22: note = HBV-targeting guide sequence portion
  source 1..22: mol_type = other RNA
ttggggtggagccctcaggctc

SEQ ID NO: 18762 - RNA, 22 nt, synthetic construct
  misc_feature 1..22: note = HBV-targeting guide sequence portion
  source 1..22: mol_type = other RNA
ttgggtggctttagggcatgga

SEQ ID NO: 18763 - RNA, 22 nt, synthetic construct
  misc_feature 1..22: note = HBV-targeting guide sequence portion
  source 1..22: mol_type = other RNA
ttgggtgtacatttaaacccta

SEQ ID NO: 18764 - RNA, 22 nt, synthetic construct
  misc_feature 1..22: note = HBV-targeting guide sequence portion
  source 1..22: mol_type = other RNA
ttggtaacagcggtataaaggg

SEQ ID NO: 18765 - RNA, 22 nt, synthetic construct
  misc_feature 1..22: note = HBV-targeting guide sequence portion
  source 1..22: mol_type = other RNA
ttggtagaggcaggaggcggat

SEQ ID NO: 18766 - RNA, 22 nt, synthetic construct
  misc_feature 1..22: note = HBV-targeting guide sequence portion
  source 1..22: mol_type = other RNA
ttggtcataggccatcagcgca

SEQ ID NO: 18767 - RNA, 22 nt, synthetic construct
  misc_feature 1..22: note = HBV-targeting guide sequence portion
  source 1..22: mol_type = other RNA
ttggtctgcgcaccagcaccat

SEQ ID NO: 18768 - RNA, 22 nt, synthetic construct
  misc_feature 1..22: note = HBV-targeting guide sequence portion
  source 1..22: mol_type = other RNA
ttggtgaatttaggataaaacc

SEQ ID NO: 18769 - RNA, 22 nt, synthetic construct
  misc_feature 1..22: note = HBV-targeting guide sequence portion
  source 1..22: mol_type = other RNA
ttggtgagtgattggaggttgg

SEQ ID NO: 18770 - RNA, 22 nt, synthetic construct
  misc_feature 1..22: note = HBV-targeting guide sequence portion
  source 1..22: mol_type = other RNA
ttggtgggcgttcacggtggtc

SEQ ID NO: 18771 - RNA, 22 nt, synthetic construct
  misc_feature 1..22: note = HBV-targeting guide sequence portion
  source 1..22: mol_type = other RNA
ttggtggtctataagctggagg

SEQ ID NO: 18772 - RNA, 22 nt, synthetic construct
  misc_feature 1..22: note = HBV-targeting guide sequence portion
  source 1..22: mol_type = other RNA
ttggtgtagatgtatattagga

SEQ ID NO: 18773 - RNA, 22 nt, synthetic construct
  misc_feature 1..22: note = HBV-targeting guide sequence portion
  source 1..22: mol_type = other RNA
ttggtgtcttttggagtgtgga

SEQ ID NO: 18774 - RNA, 22 nt, synthetic construct
  misc_feature 1..22: note = HBV-targeting guide sequence portion
  source 1..22: mol_type = other RNA
ttggttcttctggactatcaag

SEQ ID NO: 18775 - RNA, 22 nt, synthetic construct
  misc_feature 1..22: note = HBV-targeting guide sequence portion
  source 1..22: mol_type = other RNA
ttgtaagttggcgaaaaagtga

SEQ ID NO: 18776 - RNA, 22 nt, synthetic construct
  misc_feature 1..22: note = HBV-targeting guide sequence portion
  source 1..22: mol_type = other RNA
ttgtacagcaacaggagggata

SEQ ID NO: 18777 - RNA, 22 nt, synthetic construct
  misc_feature 1..22: note = HBV-targeting guide sequence portion
  source 1..22: mol_type = other RNA
ttgtactaggaggctgtaggca

SEQ ID NO: 18778 - RNA, 22 nt, synthetic construct
  misc_feature 1..22: note = HBV-targeting guide sequence portion
  source 1..22: mol_type = other RNA
ttgtaggcccgcttacagttaa

SEQ ID NO: 18779 - RNA, 22 nt, synthetic construct
  misc_feature 1..22: note = HBV-targeting guide sequence portion
  source 1..22: mol_type = other RNA
ttgtatgcatgtattcaatcta

SEQ ID NO: 18780 - RNA, 22 nt, synthetic construct
  misc_feature 1..22: note = HBV-targeting guide sequence portion
  source 1..22: mol_type = other RNA
ttgtcaacaaggaaaaccccgc

SEQ ID NO: 18781 - RNA, 22 nt, synthetic construct
  misc_feature 1..22: note = HBV-targeting guide sequence portion
  source 1..22: mol_type = other RNA
ttgtcagtcccgagaatgtttg

SEQ ID NO: 18782 - RNA, 22 nt, synthetic construct
  misc_feature 1..22: note = HBV-targeting guide sequence portion
  source 1..22: mol_type = other RNA
ttgtcctctcccgcaaatatac

SEQ ID NO: 18783 - RNA, 22 nt, synthetic construct
  misc_feature 1..22: note = HBV-targeting guide sequence portion
  source 1..22: mol_type = other RNA
ttgtcctggttatcgctggatg

SEQ ID NO: 18784 - RNA, 22 nt, synthetic construct
  misc_feature 1..22: note = HBV-targeting guide sequence portion
  source 1..22: mol_type = other RNA
ttgtctgaactttaggcccata

SEQ ID NO: 18785 - RNA, 22 nt, synthetic construct
  misc_feature 1..22: note = HBV-targeting guide sequence portion
  source 1..22: mol_type = other RNA
ttgtcttacttttggaagagaa

SEQ ID NO: 18786 - RNA, 22 nt, synthetic construct
  misc_feature 1..22: note = HBV-targeting guide sequence portion
  source 1..22: mol_type = other RNA
ttgtctttgggtgtacatttaa

SEQ ID NO: 18787 - RNA, 22 nt, synthetic construct
  misc_feature 1..22: note = HBV-targeting guide sequence portion
  source 1..22: mol_type = other RNA
ttgtgaggattcttgtcaacaa

SEQ ID NO: 18788 - RNA, 22 nt, synthetic construct
  misc_feature 1..22: note = HBV-targeting guide sequence portion
  source 1..22: mol_type = other RNA
ttgtggcaatgatccccaacaa

SEQ ID NO: 18789 - RNA, 22 nt, synthetic construct
  misc_feature 1..22: note = HBV-targeting guide sequence portion
  source 1..22: mol_type = other RNA
ttgtgggtcttctgggttttgc

SEQ ID NO: 18790 - RNA, 22 nt, synthetic construct
  misc_feature 1..22: note = HBV-targeting guide sequence portion
  source 1..22: mol_type = other RNA
ttgtggtttcacatttcttgtc

SEQ ID NO: 18791 - RNA, 22 nt, synthetic construct
  misc_feature 1..22: note = HBV-targeting guide sequence portion
  source 1..22: mol_type = other RNA
ttgtgtaaaaggggcagcaaaa

SEQ ID NO: 18792 - RNA, 22 nt, synthetic construct
  misc_feature 1..22: note = HBV-targeting guide sequence portion
  source 1..22: mol_type = other RNA
ttgtgtatgatgtgattttgtg

SEQ ID NO: 18793 - RNA, 22 nt, synthetic construct
  misc_feature 1..22: note = HBV-targeting guide sequence portion
  source 1..22: mol_type = other RNA
ttgtgttgttagacgacgaggc

SEQ ID NO: 18794 - RNA, 22 nt, synthetic construct
  misc_feature 1..22: note = HBV-targeting guide sequence portion
  source 1..22: mol_type = other RNA
ttgttagacgacgaggcaggtc

SEQ ID NO: 18795 - RNA, 22 nt, synthetic construct
  misc_feature 1..22: note = HBV-targeting guide sequence portion
  source 1..22: mol_type = other RNA
ttgttagggtttaaatgtacac

SEQ ID NO: 18796 - RNA, 22 nt, synthetic construct
  misc_feature 1..22: note = HBV-targeting guide sequence portion
  source 1..22: mol_type = other RNA
ttgttcacctcaccatactgca

SEQ ID NO: 18797 - RNA, 22 nt, synthetic construct
  misc_feature 1..22: note = HBV-targeting guide sequence portion
  source 1..22: mol_type = other RNA
ttgttcagtggttcgtagggct

SEQ ID NO: 18798 - RNA, 22 nt, synthetic construct
  misc_feature 1..22: note = HBV-targeting guide sequence portion
  source 1..22: mol_type = other RNA
ttgttcatgtcctactgttcaa

SEQ ID NO: 18799 - RNA, 22 nt, synthetic construct
  misc_feature 1..22: note = HBV-targeting guide sequence portion
  source 1..22: mol_type = other RNA
ttgttcccaagaatatggtgac

SEQ ID NO: 18800 - RNA, 22 nt, synthetic construct
  misc_feature 1..22: note = HBV-targeting guide sequence portion
  source 1..22: mol_type = other RNA
ttgttgacaagaatcctcacaa

SEQ ID NO: 18801 - RNA, 22 nt, synthetic construct
  misc_feature 1..22: note = HBV-targeting guide sequence portion
  source 1..22: mol_type = other RNA
ttgttggagtttgctctgaagg

SEQ ID NO: 18802 - RNA, 22 nt, synthetic construct
  misc_feature 1..22: note = HBV-targeting guide sequence portion
  source 1..22: mol_type = other RNA
ttgttggcgtctggccagggat

SEQ ID NO: 18803 - RNA, 22 nt, synthetic construct
  misc_feature 1..22: note = HBV-targeting guide sequence portion
  source 1..22: mol_type = other RNA
ttgttgggattgaagtcccaat

SEQ ID NO: 18804 - RNA, 22 nt, synthetic construct
  misc_feature 1..22: note = HBV-targeting guide sequence portion
  source 1..22: mol_type = other RNA
ttgttggggatcattgccacaa

SEQ ID NO: 18805 - RNA, 22 nt, synthetic construct
  misc_feature 1..22: note = HBV-targeting guide sequence portion
  source 1..22: mol_type = other RNA
ttgttggttcttctggactatc

SEQ ID NO: 18806 - RNA, 22 nt, synthetic construct
  misc_feature 1..22: note = HBV-targeting guide sequence portion
  source 1..22: mol_type = other RNA
ttgtttaaagactgggaggagt

SEQ ID NO: 18807 - RNA, 22 nt, synthetic construct
  misc_feature 1..22: note = HBV-targeting guide sequence portion
  source 1..22: mol_type = other RNA
ttgtttacacagaaaggccttg

SEQ ID NO: 18808 - RNA, 22 nt, synthetic construct
  misc_feature 1..22: note = HBV-targeting guide sequence portion
  source 1..22: mol_type = other RNA
ttgtttacgtcccgtcggcgct

SEQ ID NO: 18809 - RNA, 22 nt, synthetic construct
  misc_feature 1..22: note = HBV-targeting guide sequence portion
  source 1..22: mol_type = other RNA
ttgttttgctcgcagccggtct

SEQ ID NO: 18810 - RNA, 22 nt, synthetic construct
  misc_feature 1..22: note = HBV-targeting guide sequence portion
  source 1..22: mol_type = other RNA
ttgttttgttagggtttaaatg

SEQ ID NO: 18811 - RNA, 22 nt, synthetic construct
  misc_feature 1..22: note = HBV-targeting guide sequence portion
  source 1..22: mol_type = other RNA
tttaaacaaacagtctttgaag

SEQ ID NO: 18812 - RNA, 22 nt, synthetic construct
  misc_feature 1..22: note = HBV-targeting guide sequence portion
  source 1..22: mol_type = other RNA
tttaaaccctaacaaaacaaag

SEQ ID NO: 18813 - RNA, 22 nt, synthetic construct
  misc_feature 1..22: note = HBV-targeting guide sequence portion
  source 1..22: mol_type = other RNA
tttaaagactgggaggagttgg

SEQ ID NO: 18814 - RNA, 22 nt, synthetic construct
  misc_feature 1..22: note = HBV-targeting guide sequence portion
  source 1..22: mol_type = other RNA
tttaaatgtacacccaaagaca

SEQ ID NO: 18815 - RNA, 22 nt, synthetic construct
  misc_feature 1..22: note = HBV-targeting guide sequence portion
  source 1..22: mol_type = other RNA
tttaaccctcattggaaaacac

SEQ ID NO: 18816 - RNA, 22 nt, synthetic construct
  misc_feature 1..22: note = HBV-targeting guide sequence portion
  source 1..22: mol_type = other RNA
tttaatacccttatccaagggc

SEQ ID NO: 18817 - RNA, 22 nt, synthetic construct
  misc_feature 1..22: note = HBV-targeting guide sequence portion
  source 1..22: mol_type = other RNA
tttaatgcccttgtatgcatgt

SEQ ID NO: 18818 - RNA, 22 nt, synthetic construct
  misc_feature 1..22: note = HBV-targeting guide sequence portion
  source 1..22: mol_type = other RNA
tttacacaatgtggttatcctg

SEQ ID NO: 18819 - RNA, 22 nt, synthetic construct
  misc_feature 1..22: note = HBV-targeting guide sequence portion
  source 1..22: mol_type = other RNA
tttacacactctatggaaggcg

SEQ ID NO: 18820 - RNA, 22 nt, synthetic construct
  misc_feature 1..22: note = HBV-targeting guide sequence portion
  source 1..22: mol_type = other RNA
tttacacagaaaggccttgtaa

SEQ ID NO: 18821 - RNA, 22 nt, synthetic construct
  misc_feature 1..22: note = HBV-targeting guide sequence portion
  source 1..22: mol_type = other RNA
tttaccccgttgccaggcaacg

SEQ ID NO: 18822 - RNA, 22 nt, synthetic construct
  misc_feature 1..22: note = HBV-targeting guide sequence portion
  source 1..22: mol_type = other RNA
tttacgcggactccccgtctgt

SEQ ID NO: 18823 - RNA, 22 nt, synthetic construct
  misc_feature 1..22: note = HBV-targeting guide sequence portion
  source 1..22: mol_type = other RNA
tttacggggctttattcttcta

SEQ ID NO: 18824 - RNA, 22 nt, synthetic construct
  misc_feature 1..22: note = HBV-targeting guide sequence portion
  source 1..22: mol_type = other RNA
tttacgtcccgtcggcgctgaa

SEQ ID NO: 18825 - RNA, 22 nt, synthetic construct
  misc_feature 1..22: note = HBV-targeting guide sequence portion
  source 1..22: mol_type = other RNA
tttactagtgccatttgttcag

SEQ ID NO: 18826 - RNA, 22 nt, synthetic construct
  misc_feature 1..22: note = HBV-targeting guide sequence portion
  source 1..22: mol_type = other RNA
tttactgttcctgaactggagc

SEQ ID NO: 18827 - RNA, 22 nt, synthetic construct
  misc_feature 1..22: note = HBV-targeting guide sequence portion
  source 1..22: mol_type = other RNA
tttagaagatcaagcatctagg

SEQ ID NO: 18828 - RNA, 22 nt, synthetic construct
  misc_feature 1..22: note = HBV-targeting guide sequence portion
  source 1..22: mol_type = other RNA
tttaggataaaacctagcaggc

SEQ ID NO: 18829 - RNA, 22 nt, synthetic construct
  misc_feature 1..22: note = HBV-targeting guide sequence portion
  source 1..22: mol_type = other RNA
tttaggcccatatgagtgttga

SEQ ID NO: 18830 - RNA, 22 nt, synthetic construct
  misc_feature 1..22: note = HBV-targeting guide sequence portion
  source 1..22: mol_type = other RNA
tttagggcatggacattgaccc

SEQ ID NO: 18831 - RNA, 22 nt, synthetic construct
  misc_feature 1..22: note = HBV-targeting guide sequence portion
  source 1..22: mol_type = other RNA
tttataccgctgttaccaattt

SEQ ID NO: 18832 - RNA, 22 nt, synthetic construct
  misc_feature 1..22: note = HBV-targeting guide sequence portion
  source 1..22: mol_type = other RNA
tttatataagagagtgtcaaca

SEQ ID NO: 18833 - RNA, 22 nt, synthetic construct
  misc_feature 1..22: note = HBV-targeting guide sequence portion
  source 1..22: mol_type = other RNA
tttatatgggtcaatgtccatg

SEQ ID NO: 18834 - RNA, 22 nt, synthetic construct
  misc_feature 1..22: note = HBV-targeting guide sequence portion
  source 1..22: mol_type = other RNA
tttatcatcttcctcttcatcc

SEQ ID NO: 18835 - RNA, 22 nt, synthetic construct
  misc_feature 1..22: note = HBV-targeting guide sequence portion
  source 1..22: mol_type = other RNA
tttatcctaaattcaccaaata

SEQ ID NO: 18836 - RNA, 22 nt, synthetic construct
  misc_feature 1..22: note = HBV-targeting guide sequence portion
  source 1..22: mol_type = other RNA
tttatgcctacagcctcctagt

SEQ ID NO: 18837 - RNA, 22 nt, synthetic construct
  misc_feature 1..22: note = HBV-targeting guide sequence portion
  source 1..22: mol_type = other RNA
tttattcttctactgtacctgt

SEQ ID NO: 18838 - RNA, 22 nt, synthetic construct
  misc_feature 1..22: note = HBV-targeting guide sequence portion
  source 1..22: mol_type = other RNA
tttcaaccgtcttttctcatta

SEQ ID NO: 18839 - RNA, 22 nt, synthetic construct
  misc_feature 1..22: note = HBV-targeting guide sequence portion
  source 1..22: mol_type = other RNA
tttcacatttcttgtcttactt

SEQ ID NO: 18840 - RNA, 22 nt, synthetic construct
  misc_feature 1..22: note = HBV-targeting guide sequence portion
  source 1..22: mol_type = other RNA
tttcacctctgcctaatcatct

SEQ ID NO: 18841 - RNA, 22 nt, synthetic construct
  misc_feature 1..22: note = HBV-targeting guide sequence portion
  source 1..22: mol_type = other RNA
tttcactttttcgccaacttac

SEQ ID NO: 18842 - RNA, 22 nt, synthetic construct
  misc_feature 1..22: note = HBV-targeting guide sequence portion
  source 1..22: mol_type = other RNA
tttcagaaaactcccggttaac

SEQ ID NO: 18843 - RNA, 22 nt, synthetic construct
  misc_feature 1..22: note = HBV-targeting guide sequence portion
  source 1..22: mol_type = other RNA
tttcagttatatggatgatgtg

SEQ ID NO: 18844 - RNA, 22 nt, synthetic construct
  misc_feature 1..22: note = HBV-targeting guide sequence portion
  source 1..22: mol_type = other RNA
tttcatgggctatgtcattgat

SEQ ID NO: 18845 - RNA, 22 nt, synthetic construct
  misc_feature 1..22: note = HBV-targeting guide sequence portion
  source 1..22: mol_type = other RNA
tttccaatcaataggcctgtta

SEQ ID NO: 18846 - RNA, 22 nt, synthetic construct
  misc_feature 1..22: note = HBV-targeting guide sequence portion
  source 1..22: mol_type = other RNA
tttccaatgagggttaaagaca

SEQ ID NO: 18847 - RNA, 22 nt, synthetic construct
  misc_feature 1..22: note = HBV-targeting guide sequence portion
  source 1..22: mol_type = other RNA
tttccaccagcaatcctctggg

SEQ ID NO: 18848 - RNA, 22 nt, synthetic construct
  misc_feature 1..22: note = HBV-targeting guide sequence portion
  source 1..22: mol_type = other RNA
tttccatccgaaggttttgtac

SEQ ID NO: 18849 - RNA, 22 nt, synthetic construct
  misc_feature 1..22: note = HBV-targeting guide sequence portion
  source 1..22: mol_type = other RNA
tttcccaccttatgagtccaag

SEQ ID NO: 18850 - RNA, 22 nt, synthetic construct
  misc_feature 1..22: note = HBV-targeting guide sequence portion
  source 1..22: mol_type = other RNA
tttcccccactgtttggctttc

SEQ ID NO: 18851 - RNA, 22 nt, synthetic construct
  misc_feature 1..22: note = HBV-targeting guide sequence portion
  source 1..22: mol_type = other RNA
tttcccgaccaccagttggacc

SEQ ID NO: 18852 - RNA, 22 nt, synthetic construct
  misc_feature 1..22: note = HBV-targeting guide sequence portion
  source 1..22: mol_type = other RNA
tttcccgtctgtcctctaattc

SEQ ID NO: 18853 - RNA, 22 nt, synthetic construct
  misc_feature 1..22: note = HBV-targeting guide sequence portion
  source 1..22: mol_type = other RNA
tttccgaaagcccaggatgatg

SEQ ID NO: 18854 - RNA, 22 nt, synthetic construct
  misc_feature 1..22: note = HBV-targeting guide sequence portion
  source 1..22: mol_type = other RNA
tttccggctcctctgccgatcc

SEQ ID NO: 18855 - RNA, 22 nt, synthetic construct
  misc_feature 1..22: note = HBV-targeting guide sequence portion
  source 1..22: mol_type = other RNA
tttcctaatatacatctacacc

SEQ ID NO: 18856 - RNA, 22 nt, synthetic construct
  misc_feature 1..22: note = HBV-targeting guide sequence portion
  source 1..22: mol_type = other RNA
tttccttccgtacgagatcttc

SEQ ID NO: 18857 - RNA, 22 nt, synthetic construct
  misc_feature 1..22: note = HBV-targeting guide sequence portion
  source 1..22: mol_type = other RNA
tttccttgttgacaagaatcct

SEQ ID NO: 18858 - RNA, 22 nt, synthetic construct
  misc_feature 1..22: note = HBV-targeting guide sequence portion
  source 1..22: mol_type = other RNA
tttcgccaacttacaaggcctt

SEQ ID NO: 18859 - RNA, 22 nt, synthetic construct
  misc_feature 1..22: note = HBV-targeting guide sequence portion
  source 1..22: mol_type = other RNA
tttcggaaaattcctatgggag

SEQ ID NO: 18860 - RNA, 22 nt, synthetic construct
  misc_feature 1..22: note = HBV-targeting guide sequence portion
  source 1..22: mol_type = other RNA
tttctagggggaactaccgtgt

SEQ ID NO: 18861 - RNA, 22 nt, synthetic construct
  misc_feature 1..22: note = HBV-targeting guide sequence portion
  source 1..22: mol_type = other RNA
tttctcagaggtggagacagcg

SEQ ID NO: 18862 - RNA, 22 nt, synthetic construct
  misc_feature 1..22: note = HBV-targeting guide sequence portion
  source 1..22: mol_type = other RNA
tttctcattaactgtaagcggg

SEQ ID NO: 18863 - RNA, 22 nt, synthetic construct
  misc_feature 1..22: note = HBV-targeting guide sequence portion
  source 1..22: mol_type = other RNA
tttctcttccaaaagtaagaca

SEQ ID NO: 18864 - RNA, 22 nt, synthetic construct
  misc_feature 1..22: note = HBV-targeting guide sequence portion
  source 1..22: mol_type = other RNA
tttctcttggctcagtttacta

SEQ ID NO: 18865 - RNA, 22 nt, synthetic construct
  misc_feature 1..22: note = HBV-targeting guide sequence portion
  source 1..22: mol_type = other RNA
tttctgaaacattctttgattt

SEQ ID NO: 18866 - RNA, 22 nt, synthetic construct
  misc_feature 1..22: note = HBV-targeting guide sequence portion
  source 1..22: mol_type = other RNA
tttctgtgtaaacaatacctga

SEQ ID NO: 18867 - RNA, 22 nt, synthetic construct
  misc_feature 1..22: note = HBV-targeting guide sequence portion
  source 1..22: mol_type = other RNA
tttcttgtcttacttttggaag

SEQ ID NO: 18868 - RNA, 22 nt, synthetic construct
  misc_feature 1..22: note = HBV-targeting guide sequence portion
  source 1..22: mol_type = other RNA
tttcttttgtctttgggtgtac

SEQ ID NO: 18869 - RNA, 22 nt, synthetic construct
  misc_feature 1..22: note = HBV-targeting guide sequence portion
  source 1..22: mol_type = other RNA
tttgaagtatgcctcaaggtcg

SEQ ID NO: 18870 - RNA, 22 nt, synthetic construct
  misc_feature 1..22: note = HBV-targeting guide sequence portion
  source 1..22: mol_type = other RNA
tttgataatatcttggtgtaga

SEQ ID NO: 18871 - RNA, 22 nt, synthetic construct
  misc_feature 1..22: note = HBV-targeting guide sequence portion
  source 1..22: mol_type = other RNA
tttgattttgtgtatgatgtga

SEQ ID NO: 18872 - RNA, 22 nt, synthetic construct
  misc_feature 1..22: note = HBV-targeting guide sequence portion
  source 1..22: mol_type = other RNA
tttgcattatgccctgagcctg

SEQ ID NO: 18873 - RNA, 22 nt, synthetic construct
  misc_feature 1..22: note = HBV-targeting guide sequence portion
  source 1..22: mol_type = other RNA
tttgccttctgacttctttcct

SEQ ID NO: 18874 - RNA, 22 nt, synthetic construct
  misc_feature 1..22: note = HBV-targeting guide sequence portion
  source 1..22: mol_type = other RNA
tttgcgggagaggacaacagag

SEQ ID NO: 18875 - RNA, 22 nt, synthetic construct
  misc_feature 1..22: note = HBV-targeting guide sequence portion
  source 1..22: mol_type = other RNA
tttgctccagaccggctgcgag

SEQ ID NO: 18876 - RNA, 22 nt, synthetic construct
  misc_feature 1..22: note = HBV-targeting guide sequence portion
  source 1..22: mol_type = other RNA
tttgctcgcagccggtctggag

SEQ ID NO: 18877 - RNA, 22 nt, synthetic construct
  misc_feature 1..22: note = HBV-targeting guide sequence portion
  source 1..22: mol_type = other RNA
tttgctctgaaggctgggtcca

SEQ ID NO: 18878 - RNA, 22 nt, synthetic construct
  misc_feature 1..22: note = HBV-targeting guide sequence portion
  source 1..22: mol_type = other RNA
tttgctgatgcaacccccactg

SEQ ID NO: 18879 - RNA, 22 nt, synthetic construct
  misc_feature 1..22: note = HBV-targeting guide sequence portion
  source 1..22: mol_type = other RNA
tttgctgccccttttacacaat

SEQ ID NO: 18880 - RNA, 22 nt, synthetic construct
  misc_feature 1..22: note = HBV-targeting guide sequence portion
  source 1..22: mol_type = other RNA
tttgctggcaaggtttgcatta

SEQ ID NO: 18881 - RNA, 22 nt, synthetic construct
  misc_feature 1..22: note = HBV-targeting guide sequence portion
  source 1..22: mol_type = other RNA
tttgctggggagaactaatgac

SEQ ID NO: 18882 - RNA, 22 nt, synthetic construct
  misc_feature 1..22: note = HBV-targeting guide sequence portion
  source 1..22: mol_type = other RNA
tttggaagagaaacggtcctag

SEQ ID NO: 18883 - RNA, 22 nt, synthetic construct
  misc_feature 1..22: note = HBV-targeting guide sequence portion
  source 1..22: mol_type = other RNA
tttggaagtaatgattaactag

SEQ ID NO: 18884 - RNA, 22 nt, synthetic construct
  misc_feature 1..22: note = HBV-targeting guide sequence portion
  source 1..22: mol_type = other RNA
tttggagctactgtggagttac

SEQ ID NO: 18885 - RNA, 22 nt, synthetic construct
  misc_feature 1..22: note = HBV-targeting guide sequence portion
  source 1..22: mol_type = other RNA
tttggagtgtggattcgcactc

SEQ ID NO: 18886 - RNA, 22 nt, synthetic construct
  misc_feature 1..22: note = HBV-targeting guide sequence portion
  source 1..22: mol_type = other RNA
tttggccaagacacacggtagt

SEQ ID NO: 18887 - RNA, 22 nt, synthetic construct
  misc_feature 1..22: note = HBV-targeting guide sequence portion
  source 1..22: mol_type = other RNA
tttggctttcagttatatggat

SEQ ID NO: 18888 - RNA, 22 nt, synthetic construct
  misc_feature 1..22: note = HBV-targeting guide sequence portion
  source 1..22: mol_type = other RNA
tttggggtggagccctcaggct

SEQ ID NO: 18889 - RNA, 22 nt, synthetic construct
  misc_feature 1..22: note = HBV-targeting guide sequence portion
  source 1..22: mol_type = other RNA
tttgggtgtacatttaaaccct

SEQ ID NO: 18890 - RNA, 22 nt, synthetic construct
  misc_feature 1..22: note = HBV-targeting guide sequence portion
  source 1..22: mol_type = other RNA
tttggtgaatttaggataaaac

SEQ ID NO: 18891 - RNA, 22 nt, synthetic construct
  misc_feature 1..22: note = HBV-targeting guide sequence portion
  source 1..22: mol_type = other RNA
tttggtggtctataagctggag

SEQ ID NO: 18892 - RNA, 22 nt, synthetic construct
  misc_feature 1..22: note = HBV-targeting guide sequence portion
  source 1..22: mol_type = other RNA
tttggtgtcttttggagtgtgg

SEQ ID NO: 18893 - RNA, 22 nt, synthetic construct
  misc_feature 1..22: note = HBV-targeting guide sequence portion
  source 1..22: mol_type = other RNA
tttgtacagcaacaggagggat

SEQ ID NO: 18894 - RNA, 22 nt, synthetic construct
  misc_feature 1..22: note = HBV-targeting guide sequence portion
  source 1..22: mol_type = other RNA
tttgtactaggaggctgtaggc

SEQ ID NO: 18895 - RNA, 22 nt, synthetic construct
  misc_feature 1..22: note = HBV-targeting guide sequence portion
  source 1..22: mol_type = other RNA
tttgtaggcccgcttacagtta

SEQ ID NO: 18896 - RNA, 22 nt, synthetic construct
  misc_feature 1..22: note = HBV-targeting guide sequence portion
  source 1..22: mol_type = other RNA
tttgtctttgggtgtacattta

SEQ ID NO: 18897 - RNA, 22 nt, synthetic construct
  misc_feature 1..22: note = HBV-targeting guide sequence portion
  source 1..22: mol_type = other RNA
tttgtggcaatgatccccaaca

SEQ ID NO: 18898 - RNA, 22 nt, synthetic construct
  misc_feature 1..22: note = HBV-targeting guide sequence portion
  source 1..22: mol_type = other RNA
tttgtgtatgatgtgattttgt

SEQ ID NO: 18899 - RNA, 22 nt, synthetic construct
  misc_feature 1..22: note = HBV-targeting guide sequence portion
  source 1..22: mol_type = other RNA
tttgttagggtttaaatgtaca

SEQ ID NO: 18900 - RNA, 22 nt, synthetic construct
  misc_feature 1..22: note = HBV-targeting guide sequence portion
  source 1..22: mol_type = other RNA
tttgttcagtggttcgtagggc

SEQ ID NO: 18901 - RNA, 22 nt, synthetic construct
  misc_feature 1..22: note = HBV-targeting guide sequence portion
  source 1..22: mol_type = other RNA
tttgtttaaagactgggaggag

SEQ ID NO: 18902 - RNA, 22 nt, synthetic construct
  misc_feature 1..22: note = HBV-targeting guide sequence portion
  source 1..22: mol_type = other RNA
tttgtttacgtcccgtcggcgc

SEQ ID NO: 18903 - RNA, 22 nt, synthetic construct
  misc_feature 1..22: note = HBV-targeting guide sequence portion
  source 1..22: mol_type = other RNA
tttgttttgttagggtttaaat

SEQ ID NO: 18904 - RNA, 22 nt, synthetic construct
  misc_feature 1..22: note = HBV-targeting guide sequence portion
  source 1..22: mol_type = other RNA
ttttacacaatgtggttatcct

SEQ ID NO: 18905 - RNA, 22 nt, synthetic construct
  misc_feature 1..22: note = HBV-targeting guide sequence portion
  source 1..22: mol_type = other RNA
ttttacggggctttattcttct

SEQ ID NO: 18906 - RNA, 22 nt, synthetic construct
  misc_feature 1..22: note = HBV-targeting guide sequence portion
  source 1..22: mol_type = other RNA
ttttatataagagagtgtcaac

SEQ ID NO: 18907 - RNA, 22 nt, synthetic construct
  misc_feature 1..22: note = HBV-targeting guide sequence portion
  source 1..22: mol_type = other RNA
ttttatcatcttcctcttcatc

SEQ ID NO: 18908 - RNA, 22 nt, synthetic construct
  misc_feature 1..22: note = HBV-targeting guide sequence portion
  source 1..22: mol_type = other RNA
ttttatcctaaattcaccaaat

SEQ ID NO: 18909 - RNA, 22 nt, synthetic construct
  misc_feature 1..22: note = HBV-targeting guide sequence portion
  source 1..22: mol_type = other RNA
ttttcacctctgcctaatcatc

SEQ ID NO: 18910 - RNA, 22 nt, synthetic construct
  misc_feature 1..22: note = HBV-targeting guide sequence portion
  source 1..22: mol_type = other RNA
ttttccaatgagggttaaagac

SEQ ID NO: 18911 - RNA, 22 nt, synthetic construct
  misc_feature 1..22: note = HBV-targeting guide sequence portion
  source 1..22: mol_type = other RNA
ttttccgaaagcccaggatgat

SEQ ID NO: 18912 - RNA, 22 nt, synthetic construct
  misc_feature 1..22: note = HBV-targeting guide sequence portion
  source 1..22: mol_type = other RNA
ttttcctaatatacatctacac

SEQ ID NO: 18913 - RNA, 22 nt, synthetic construct
  misc_feature 1..22: note = HBV-targeting guide sequence portion
  source 1..22: mol_type = other RNA
ttttccttgttgacaagaatcc

SEQ ID NO: 18914 - RNA, 22 nt, synthetic construct
  misc_feature 1..22: note = HBV-targeting guide sequence portion
  source 1..22: mol_type = other RNA
ttttcgccaacttacaaggcct

SEQ ID NO: 18915 - RNA, 22 nt, synthetic construct
  misc_feature 1..22: note = HBV-targeting guide sequence portion
  source 1..22: mol_type = other RNA
ttttctagggggaactaccgtg

SEQ ID NO: 18916 - RNA, 22 nt, synthetic construct
  misc_feature 1..22: note = HBV-targeting guide sequence portion
  source 1..22: mol_type = other RNA
ttttctcattaactgtaagcgg

SEQ ID NO: 18917 - RNA, 22 nt, synthetic construct
  misc_feature 1..22: note = HBV-targeting guide sequence portion
  source 1..22: mol_type = other RNA
ttttctgaaacattctttgatt

SEQ ID NO: 18918 - RNA, 22 nt, synthetic construct
  misc_feature 1..22: note = HBV-targeting guide sequence portion
  source 1..22: mol_type = other RNA
ttttcttttgtctttgggtgta

SEQ ID NO: 18919 - RNA, 22 nt, synthetic construct
  misc_feature 1..22: note = HBV-targeting guide sequence portion
  source 1..22: mol_type = other RNA
ttttgataatatcttggtgtag

SEQ ID NO: 18920 - RNA, 22 nt, synthetic construct
  misc_feature 1..22: note = HBV-targeting guide sequence portion
  source 1..22: mol_type = other RNA
ttttgccttctgacttctttcc

SEQ ID NO: 18921 - RNA, 22 nt, synthetic construct
  misc_feature 1..22: note = HBV-targeting guide sequence portion
  source 1..22: mol_type = other RNA
ttttgctcgcagccggtctgga

SEQ ID NO: 18922 - RNA, 22 nt, synthetic construct
  misc_feature 1..22: note = HBV-targeting guide sequence portion
  source 1..22: mol_type = other RNA
ttttgctgccccttttacacaa

SEQ ID NO: 18923 - RNA, 22 nt, synthetic construct
  misc_feature 1..22: note = HBV-targeting guide sequence portion
  source 1..22: mol_type = other RNA
ttttggaagagaaacggtccta

SEQ ID NO: 18924 - RNA, 22 nt, synthetic construct
  misc_feature 1..22: note = HBV-targeting guide sequence portion
  source 1..22: mol_type = other RNA
ttttggagtgtggattcgcact

SEQ ID NO: 18925 - RNA, 22 nt, synthetic construct
  misc_feature 1..22: note = HBV-targeting guide sequence portion
  source 1..22: mol_type = other RNA
ttttggccaagacacacggtag

SEQ ID NO: 18926 - RNA, 22 nt, synthetic construct
  misc_feature 1..22: note = HBV-targeting guide sequence portion
  source 1..22: mol_type = other RNA
ttttggggtggagccctcaggc

SEQ ID NO: 18927 - RNA, 22 nt, synthetic construct
  misc_feature 1..22: note = HBV-targeting guide sequence portion
  source 1..22: mol_type = other RNA
ttttgtacagcaacaggaggga

SEQ ID NO: 18928 - RNA, 22 nt, synthetic construct
  misc_feature 1..22: note = HBV-targeting guide sequence portion
  source 1..22: mol_type = other RNA
ttttgtctttgggtgtacattt

SEQ ID NO: 18929 - RNA, 22 nt, synthetic construct
  misc_feature 1..22: note = HBV-targeting guide sequence portion
  source 1..22: mol_type = other RNA
ttttgtggcaatgatccccaac

SEQ ID NO: 18930 - RNA, 22 nt, synthetic construct
  misc_feature 1..22: note = HBV-targeting guide sequence portion
  source 1..22: mol_type = other RNA
ttttgtgtatgatgtgattttg

SEQ ID NO: 18931 - RNA, 22 nt, synthetic construct
  misc_feature 1..22: note = HBV-targeting guide sequence portion
  source 1..22: mol_type = other RNA
ttttgttagggtttaaatgtac

SEQ ID NO: 18932 - RNA, 22 nt, synthetic construct
  misc_feature 1..22: note = HBV-targeting guide sequence portion
  source 1..22: mol_type = other RNA
tttttcacctctgcctaatcat

SEQ ID NO: 18933 - RNA, 22 nt, synthetic construct
  misc_feature 1..22: note = HBV-targeting guide sequence portion
  source 1..22: mol_type = other RNA
tttttcgccaacttacaaggcc

SEQ ID NO: 18934 - RNA, 22 nt, synthetic construct
  misc_feature 1..22: note = HBV-targeting guide sequence portion
  source 1..22: mol_type = other RNA
tttttgataatatcttggtgta

SEQ ID NO: 18935 - RNA, 22 nt, synthetic construct
  misc_feature 1..22: note = HBV-targeting guide sequence portion
  source 1..22: mol_type = other RNA
tttttgccttctgacttctttc

SEQ ID NO: 18936 - RNA, 22 nt, synthetic construct
  misc_feature 1..22: note = HBV-targeting guide sequence portion
  source 1..22: mol_type = other RNA
ttttttgataatatcttggtgt

SEQ ID NO: 18937 - RNA, 20 nt, synthetic construct
  misc_feature 1..20: note = Example RNA guide sequence portion
  source 1..20: mol_type = other RNA
aaaaaaatgtacttggttcc

SEQ ID NO: 18938 - RNA, 17 nt, synthetic construct
  misc_feature 1..17: note = 17 nucleotide guide sequence 1
  source 1..17: mol_type = other RNA
aaaatgtacttggttcc

SEQ ID NO: 18939 - RNA, 17 nt, synthetic construct
  misc_feature 1..17: note = 17 nucleotide guide sequence 2
  source 1..17: mol_type = other RNA
aaaaatgtacttggttc

SEQ ID NO: 18940 - RNA, 17 nt, synthetic construct
  misc_feature 1..17: note = 17 nucleotide guide sequence 3
  source 1..17: mol_type = other RNA
aaaaaatgtacttggtt

SEQ ID NO: 18941 - RNA, 17 nt, synthetic construct
  misc_feature 1..17: note = 17 nucleotide guide sequence 4
  source 1..17: mol_type = other RNA
aaaaaaatgtacttggt

SEQ ID NO: 18942 - DNA, 3186 bp, Novosphingobium sp.
  source 1..3186: mol_type = unassigned DNA; note = SYSU G00007
atggagaagagactgggcctcgacatcggcacaaatagcatcggctggtgcctgtacgagggcgactctatcctggatatcggcgtgcggatcttcagcgacggcagagatcctaaatctggcgcctctctggccgtggacagacggaatgctagagccatgcggcggagaagggatagatacctgggaagaagaagcgccctgatcaaggccctgaaggcccatggactgtttccagccgaacaggatgccgccaaggctctggaaagagaggacccttacagcctgagagtcagagccctggatcacagactggaccctcatcagatcggcagagccatcttccacctgaaccagcggagaggcttcagaagcaacagaaaggccgacagagtgctgggcgatcaagagagcggactgatcagcacagccaccagagttctggacgaagccatggccaaaagcggcgctagaacactgggagagtttctggccagccgggacactagaagagtgcggatgaggcctgacgtgaagggctacgacttctaccccaaccggcagcactacctggaagagttcgagaagatctgggacgcccagagccagtatcaccctgatctgctgtctcagcaggccaagagcgccatccaccggatcatttttcaccagaggccactgaagccacaggccgtgggaacatgtacatttgccggactgcatggcatccccggcgacgagacaagactgcctaaagctcaccctctgttccagcagcggcggctgtatgaggaagtgaaccagctggaaatcgtgtgcgccagcgctcctgccagaaagctgaccagagatgagagagatgccctgatcctgaagctgcaggacaagaaaaaagtgaccttcagcacactggcccggaccatcagactgaaagagggcgagagattcaacaaagagagcgagaaccggaaggacctggctggggatgaagtgcgggccgagatgagcgataagaccagattcggcagacggtggtttcacctgagcctggatgagcagtggtccgtgatcgacagactgctgaacgaggaaagcaccgaggatctgctggcctggctggaaaaagagtggtccctgccttctgatgtggccgaagccgtggctaatgcccatctgcctgatggccacggaagatttggcctgacagccaccgttagactgctcgaacacctgaaagccgacgtggtcacatatgccgaagctgctcggagagccggcttccaccactctgatttcagagatggcgcctgctacgacgagctgccttactatggcgagatcctgagcagagagatcgcccctggaaaggacgagtacggcgatccactggaaagacagtggggcaagatcacaaaccccaccgtgcacatcggcctgaatcagctgagaaggctgattaacgccctcgtgcggagacacggcagacccgatttcatcttcgtggaactggcccgcgagctgaagctgaatgagaagcagaaggccgaccacaagcggcggatcaagcagacaacagatgccgctagagctagagccgagaagctgagagaaatcggacagagagacagcggctccaaccggatgctgctgcggatttgggaagaactgaaccccagcaatcccctggacagaagatgcccttattgcgccgagcctatctccatcgagatgctgatgagcggcagcgccgacatcgatcacatcgtgccttacagcagatgcctggacgatagcgccgccaacaaagtggtggcccacaaccactgcaacagacagaagggcaacagaaccccttgggagcagtggggacagaccacaagatggcccctgattcaagaacaggtggcccggatgcacagatccaaacaatggcgcttcggccccgacgccatggaacgagttgatcgagatggcggctttatcgcccggcagctgacagatacccagtacctgtctagaatcgccgcacagtacctgagcgccctgtacacacctgatgaaggcagacgggtgtacgccgtgacaggcagactgactgctatgcttagacggctgtggggcctgaacgacatcctgcctgatcacaactgggtgctgaaccctcacagcaacgcccctaagaacaggctggatcatagacaccacgccatcgatgccgccgttgtgggagctacaacacccgccatgattcagcaggttgccagagctgctgcaagagccgaggaacaggacctggatagactgttcgctgacctgcctcctccatggccaggctttagagaggaactgcagggcagaattatggccgctgtggtgtctcacaagcccgaccatggaagaaagggcagaccactgcctggcagagatagcacatccggcagactgcacaatgacaccgcctacggctttactggccgcagaaatgccaagggcatgcctatcgtggtcaccagaaaacccctgctggccctgaaacctgaggacctgacagaccccgagagaatcccagatcctgctctgcagggcgcactgtttgaagccactagaggcgctaccggcaaggacttcgagaaagccctgcgggacttcagcagaagagatggcccttaccagggcatcagacggattagactgaccgaggctctgaacgtgatccccatcagagatagaaccggccacgcctacaaaggcgtgaaaggcgacgccaacgccagattcgatgtttggagactgcccgacggcaagtggatcaccagatggaaggatagagatggcatcgagcacagcggcatcgtgtccctgtttgatgctcaccagcctagccaggtgtaccacagacctcatcctgccgccaaaaaggtgctgagcctgagacagaatgacctggtggcagtggaacacgatggcgaccccggaaagatcatgcgggtcgtgaagtttagcgccaacggcagcatcacattcgccccacataatgaggccggacctctgaaaacccgggacaccgatcctgccgatcctttcagatacgtgacaacagtggccagcggcctgaagaagatgagagccagacaagtgcggatcgatgagctgggcaaagtgcacgatcccggacctagagaggat

SEQ ID NO: 18943 - protein, 1062 aa, Novosphingobium sp.
  source 1..1062: note = SYSU G00007
MEKRLGLDIGTNSIGWCLYEGDSILDIGVRIFSDGRDPKSGASLAVDRRNARAMRRRRDRYLGRRSALIKALKAHGLFPAEQDAAKALEREDPYSLRVRALDHRLDPHQIGRAIFHLNQRRGFRSNRKADRVLGDQESGLISTATRVLDEAMAKSGARTLGEFLASRDTRRVRMRPDVKGYDFYPNRQHYLEEFEKIWDAQSQYHPDLLSQQAKSAIHRIIFHQRPLKPQAVGTCTFAGLHGIPGDETRLPKAHPLFQQRRLYEEVNQLEIVCASAPARKLTRDERDALILKLQDKKKVTFSTLARTIRLKEGERFNKESENRKDLAGDEVRAEMSDKTRFGRRWFHLSLDEQWSVIDRLLNEESTEDLLAWLEKEWSLPSDVAEAVANAHLPDGHGRFGLTATVRLLEHLKADVVTYAEAARRAGFHHSDFRDGACYDELPYYGEILSREIAPGKDEYGDPLERQWGKITNPTVHIGLNQLRRLINALVRRHGRPDFIFVELARELKLNEKQKADHKRRIKQTTDAARARAEKLREIGQRDSGSNRMLLRIWEELNPSNPLDRRCPYCAEPISIEMLMSGSADIDHIVPYSRCLDDSAANKVVAHNHCNRQKGNRTPWEQWGQTTRWPLIQEQVARMHRSKQWRFGPDAMERVDRDGGFIARQLTDTQYLSRIAAQYLSALYTPDEGRRVYAVTGRLTAMLRRLWGLNDILPDHNWVLNPHSNAPKNRLDHRHHAIDAAVVGATTPAMIQQVARAAARAEEQDLDRLFADLPPPWPGFREELQGRIMAAVVSHKPDHGRKGRPLPGRDSTSGRLHNDTAYGFTGRRNAKGMPIVVTRKPLLALKPEDLTDPERIPDPALQGALFEATRGATGKDFEKALRDFSRRDGPYQGIRRIRLTEALNVIPIRDRTGHAYKGVKGDANARFDVWRLPDGKWITRWKDRDGIEHSGIVSLFDAHQPSQVYHRPHPAAKKVLSLRQNDLVAVEHDGDPGKIMRVVKFSANGSITFAPHNEAGPLKTRDTDPADPFRYVTTVASGLKKMRARQVRIDELGKVHDPGPRED

SEQ ID NO: 18944 - protein, 1062 aa, synthetic construct
MEKRLGLDIGTNSLGWCLYEGDSILDIGVRIFSDGRDPKSGASLAVDRRNARAMRRRRDRYLGRRSALIKALKAHGLFPAEQDAAKALEREDPYSLRVRALDHRLDPHQIGRAIFHLNQRRGFRSNRKADRVLGDQESGLISTATRVLDEAMAKSGARTLGEFLASRDTRRVRMRPDVKGYDFYPNRQHYLEEFEKIWDAQSQYHPDLLSQQAKSAIHRIIFHQRPLKPQAVGTCTFAGLHGIPGDETRLPKAHPLFQQRRLYEEVNQLEIVCASAPARKLTRDERDALILKLQDKKKVTFSTLARTIRLKEGERFNKESENRKDLAGDEVRAEMSDKTRFGRRWFHLSLDEQWSVIDRLLNEESTEDLLAWLEKEWSLPSDVAEAVANAHLPDGHGRFGLTATVRLLEHLKADVVTYAEAARRAGFHHSDFRDGACYDELPYYGEILSREIAPGKDEYGDPLERQWGKITNPTVHIGLNQLRRLINALVRRHGRPDFIFVELARELKLNEKQKADHKRRIKQTTDAARARAEKLREIGQRDSGSNRMLLRIWEELNPSNPLDRRCPYCAEPISIEMLMSGSADIDHIVPYSRCLDDSAANKVVAHNHCNRQKGNRTPWEQWGQTTRWPLIQEQVARMHRSKQWRFGPDAMERVDRDGGFIARQLTDTQYLSRIAAQYLSALYTPDEGRRVYAVTGRLTAMLRRLWGLNDILPDHNWVLNPHSNAPKNRLDHRHHAIDAAVVGATTPAMIQQVARAAARAEEQDLDRLFADLPPPWPGFREELQGRIMAAVVSHKPDHGRKGRPLPGRDSTSGRLHNDTAYGFTGRRNAKGMPIVVTRKPLLALKPEDLTDPERIPDPALQGALFEATRGATGKDFEKALRDFSRRDGPYQGIRRIRLTEALNVIPIRDRTGHAYKGVKGDANARFDVWRLPDGKWITRWKDRDGIEHSGIVSLFDAHQPSQVYHRPHPAAKKVLSLRQNDLVAVEHDGDPGKIMRVVKFSANGRITFAPHNEAGPLKTRDTDPADPFRYVTTVASGLKKMRARQVRIDELGKVHDPGPRED

SEQ ID NO: 18945 - RNA, 80 nt, synthetic construct
  source 1..80: mol_type = other RNA
gttgccgctggagaaatccagttgttaacaagcagcttgactgcaccaaataaggcgggggctgcggccctcgctttttt
